United States Patent Application Publication US 2026/0265739 A1, published September 10, 2026 (application 19/162,163).

The application's sequence listing, which the Patent Office published only in electronic form, follows.

SEQUENCE LISTING (1487 sequences)

SEQ ID NO: 1 - DNA, 22 bp, synthetic construct
  misc_feature 1..22: note = Synthetic oligonucleotide
  source 1..22: mol_type = other DNA
cgtaagatgtggaccgctggag

SEQ ID NO: 2 - DNA, 22 bp, synthetic construct
  misc_feature 1..22: note = Synthetic oligonucleotide
  source 1..22: mol_type = other DNA
gtaagatgtggaccgctggaga

SEQ ID NO: 3 - DNA, 22 bp, synthetic construct
  misc_feature 1..22: note = Synthetic oligonucleotide
  source 1..22: mol_type = other DNA
taagatgtggaccgctggagaa

SEQ ID NO: 4 - DNA, 22 bp, synthetic construct
  misc_feature 1..22: note = Synthetic oligonucleotide
  source 1..22: mol_type = other DNA
aagatgtggaccgctggagaat

SEQ ID NO: 5 - DNA, 22 bp, synthetic construct
  misc_feature 1..22: note = Synthetic oligonucleotide
  source 1..22: mol_type = other DNA
agatgtggaccgctggagaatg

SEQ ID NO: 6 - DNA, 22 bp, synthetic construct
  misc_feature 1..22: note = Synthetic oligonucleotide
  source 1..22: mol_type = other DNA
gatgtggaccgctggagaatgg

SEQ ID NO: 7 - DNA, 22 bp, synthetic construct
  misc_feature 1..22: note = Synthetic oligonucleotide
  source 1..22: mol_type = other DNA
atgtggaccgctggagaatggg

SEQ ID NO: 8 - DNA, 22 bp, synthetic construct
  misc_feature 1..22: note = Synthetic oligonucleotide
  source 1..22: mol_type = other DNA
tgtggaccgctggagaatgggg

SEQ ID NO: 9 - DNA, 22 bp, synthetic construct
  misc_feature 1..22: note = Synthetic oligonucleotide
  source 1..22: mol_type = other DNA
ggggtgctgcctgcagtcaaaa

SEQ ID NO: 10 - DNA, 22 bp, synthetic construct
  misc_feature 1..22: note = Synthetic oligonucleotide
  source 1..22: mol_type = other DNA
gggtgctgcctgcagtcaaaac

SEQ ID NO: 11 - DNA, 22 bp, synthetic construct
  misc_feature 1..22: note = Synthetic oligonucleotide
  source 1..22: mol_type = other DNA
ggtgctgcctgcagtcaaaacg

SEQ ID NO: 12 - DNA, 22 bp, synthetic construct
  misc_feature 1..22: note = Synthetic oligonucleotide
  source 1..22: mol_type = other DNA
gtgctgcctgcagtcaaaacgg

SEQ ID NO: 13 - DNA, 22 bp, synthetic construct
  misc_feature 1..22: note = Synthetic oligonucleotide
  source 1..22: mol_type = other DNA
tgctgcctgcagtcaaaacgga

SEQ ID NO: 14 - DNA, 22 bp, synthetic construct
  misc_feature 1..22: note = Synthetic oligonucleotide
  source 1..22: mol_type = other DNA
gctgcctgcagtcaaaacggag

SEQ ID NO: 15 - DNA, 22 bp, synthetic construct
  misc_feature 1..22: note = Synthetic oligonucleotide
  source 1..22: mol_type = other DNA
ctgcctgcagtcaaaacggagt

SEQ ID NO: 16 - DNA, 22 bp, synthetic construct
  misc_feature 1..22: note = Synthetic oligonucleotide
  source 1..22: mol_type = other DNA
tgcctgcagtcaaaacggagtg

SEQ ID NO: 17 - DNA, 22 bp, synthetic construct
  misc_feature 1..22: note = Synthetic oligonucleotide
  source 1..22: mol_type = other DNA
gcctgcagtcaaaacggagtgg

SEQ ID NO: 18 - DNA, 22 bp, synthetic construct
  misc_feature 1..22: note = Synthetic oligonucleotide
  source 1..22: mol_type = other DNA
cctgcagtcaaaacggagtggg

SEQ ID NO: 19 - DNA, 22 bp, synthetic construct
  misc_feature 1..22: note = Synthetic oligonucleotide
  source 1..22: mol_type = other DNA
ctgcagtcaaaacggagtgggg

SEQ ID NO: 20 - DNA, 22 bp, synthetic construct
  misc_feature 1..22: note = Synthetic oligonucleotide
  source 1..22: mol_type = other DNA
ggtgcccagctcagggccagaa

SEQ ID NO: 21 - DNA, 22 bp, synthetic construct
  misc_feature 1..22: note = Synthetic oligonucleotide
  source 1..22: mol_type = other DNA
gtgcccagctcagggccagaat

SEQ ID NO: 22 - DNA, 22 bp, synthetic construct
  misc_feature 1..22: note = Synthetic oligonucleotide
  source 1..22: mol_type = other DNA
tgcccagctcagggccagaatg

SEQ ID NO: 23 - DNA, 22 bp, synthetic construct
  misc_feature 1..22: note = Synthetic oligonucleotide
  source 1..22: mol_type = other DNA
gcccagctcagggccagaatga

SEQ ID NO: 24 - DNA, 22 bp, synthetic construct
  misc_feature 1..22: note = Synthetic oligonucleotide
  source 1..22: mol_type = other DNA
cccagctcagggccagaatgat

SEQ ID NO: 25 - DNA, 22 bp, synthetic construct
  misc_feature 1..22: note = Synthetic oligonucleotide
  source 1..22: mol_type = other DNA
ccagctcagggccagaatgatc

SEQ ID NO: 26 - DNA, 22 bp, synthetic construct
  misc_feature 1..22: note = Synthetic oligonucleotide
  source 1..22: mol_type = other DNA
cagctcagggccagaatgatcc

SEQ ID NO: 27 - DNA, 22 bp, synthetic construct
  misc_feature 1..22: note = Synthetic oligonucleotide
  source 1..22: mol_type = other DNA
agctcagggccagaatgatcct

SEQ ID NO: 28 - DNA, 22 bp, synthetic construct
  misc_feature 1..22: note = Synthetic oligonucleotide
  source 1..22: mol_type = other DNA
gctcagggccagaatgatccta

SEQ ID NO: 29 - DNA, 22 bp, synthetic construct
  misc_feature 1..22: note = Synthetic oligonucleotide
  source 1..22: mol_type = other DNA
ctcagggccagaatgatcctat

SEQ ID NO: 30 - DNA, 22 bp, synthetic construct
  misc_feature 1..22: note = Synthetic oligonucleotide
  source 1..22: mol_type = other DNA
tcagggccagaatgatcctatt

SEQ ID NO: 31 - DNA, 22 bp, synthetic construct
  misc_feature 1..22: note = Synthetic oligonucleotide
  source 1..22: mol_type = other DNA
cagggccagaatgatcctattc

SEQ ID NO: 32 - DNA, 22 bp, synthetic construct
  misc_feature 1..22: note = Synthetic oligonucleotide
  source 1..22: mol_type = other DNA
agggccagaatgatcctattcc

SEQ ID NO: 33 - DNA, 22 bp, synthetic construct
  misc_feature 1..22: note = Synthetic oligonucleotide
  source 1..22: mol_type = other DNA
gggccagaatgatcctattccc

SEQ ID NO: 34 - DNA, 22 bp, synthetic construct
  misc_feature 1..22: note = Synthetic oligonucleotide
  source 1..22: mol_type = other DNA
ggccagaatgatcctattcccg

SEQ ID NO: 35 - DNA, 22 bp, synthetic construct
  misc_feature 1..22: note = Synthetic oligonucleotide
  source 1..22: mol_type = other DNA
gccagaatgatcctattcccgg

SEQ ID NO: 36 - DNA, 22 bp, synthetic construct
  misc_feature 1..22: note = Synthetic oligonucleotide
  source 1..22: mol_type = other DNA
ccagaatgatcctattcccggc

SEQ ID NO: 37 - DNA, 22 bp, synthetic construct
  misc_feature 1..22: note = Synthetic oligonucleotide
  source 1..22: mol_type = other DNA
cagaatgatcctattcccggca

SEQ ID NO: 38 - DNA, 22 bp, synthetic construct
  misc_feature 1..22: note = Synthetic oligonucleotide
  source 1..22: mol_type = other DNA
agaatgatcctattcccggcac

SEQ ID NO: 39 - DNA, 22 bp, synthetic construct
  misc_feature 1..22: note = Synthetic oligonucleotide
  source 1..22: mol_type = other DNA
gaatgatcctattcccggcact

SEQ ID NO: 40 - DNA, 22 bp, synthetic construct
  misc_feature 1..22: note = Synthetic oligonucleotide
  source 1..22: mol_type = other DNA
aatgatcctattcccggcactt

SEQ ID NO: 41 - DNA, 22 bp, synthetic construct
  misc_feature 1..22: note = Synthetic oligonucleotide
  source 1..22: mol_type = other DNA
atgatcctattcccggcacttc

SEQ ID NO: 42 - DNA, 22 bp, synthetic construct
  misc_feature 1..22: note = Synthetic oligonucleotide
  source 1..22: mol_type = other DNA
tgatcctattcccggcacttct

SEQ ID NO: 43 - DNA, 22 bp, synthetic construct
  misc_feature 1..22: note = Synthetic oligonucleotide
  source 1..22: mol_type = other DNA
gatcctattcccggcacttctc

SEQ ID NO: 44 - DNA, 22 bp, synthetic construct
  misc_feature 1..22: note = Synthetic oligonucleotide
  source 1..22: mol_type = other DNA
atcctattcccggcacttctca

SEQ ID NO: 45 - DNA, 22 bp, synthetic construct
  misc_feature 1..22: note = Synthetic oligonucleotide
  source 1..22: mol_type = other DNA
tcctattcccggcacttctcag

SEQ ID NO: 46 - DNA, 22 bp, synthetic construct
  misc_feature 1..22: note = Synthetic oligonucleotide
  source 1..22: mol_type = other DNA
cctattcccggcacttctcagt

SEQ ID NO: 47 - DNA, 22 bp, synthetic construct
  misc_feature 1..22: note = Synthetic oligonucleotide
  source 1..22: mol_type = other DNA
ctattcccggcacttctcagtg

SEQ ID NO: 48 - DNA, 22 bp, synthetic construct
  misc_feature 1..22: note = Synthetic oligonucleotide
  source 1..22: mol_type = other DNA
tattcccggcacttctcagtga

SEQ ID NO: 49 - DNA, 22 bp, synthetic construct
  misc_feature 1..22: note = Synthetic oligonucleotide
  source 1..22: mol_type = other DNA
attcccggcacttctcagtgag

SEQ ID NO: 50 - DNA, 22 bp, synthetic construct
  misc_feature 1..22: note = Synthetic oligonucleotide
  source 1..22: mol_type = other DNA
ttcccggcacttctcagtgagg

SEQ ID NO: 51 - DNA, 22 bp, synthetic construct
  misc_feature 1..22: note = Synthetic oligonucleotide
  source 1..22: mol_type = other DNA
tcccggcacttctcagtgaggc

SEQ ID NO: 52 - DNA, 22 bp, synthetic construct
  misc_feature 1..22: note = Synthetic oligonucleotide
  source 1..22: mol_type = other DNA
cccggcacttctcagtgaggct

SEQ ID NO: 53 - DNA, 22 bp, synthetic construct
  misc_feature 1..22: note = Synthetic oligonucleotide
  source 1..22: mol_type = other DNA
ccggcacttctcagtgaggctc

SEQ ID NO: 54 - DNA, 22 bp, synthetic construct
  misc_feature 1..22: note = Synthetic oligonucleotide
  source 1..22: mol_type = other DNA
cggcacttctcagtgaggctct

SEQ ID NO: 55 - DNA, 22 bp, synthetic construct
  misc_feature 1..22: note = Synthetic oligonucleotide
  source 1..22: mol_type = other DNA
ggcacttctcagtgaggctctg

SEQ ID NO: 56 - DNA, 22 bp, synthetic construct
  misc_feature 1..22: note = Synthetic oligonucleotide
  source 1..22: mol_type = other DNA
gcacttctcagtgaggctctgt

SEQ ID NO: 57 - DNA, 22 bp, synthetic construct
  misc_feature 1..22: note = Synthetic oligonucleotide
  source 1..22: mol_type = other DNA
cacttctcagtgaggctctgtg

SEQ ID NO: 58 - DNA, 22 bp, synthetic construct
  misc_feature 1..22: note = Synthetic oligonucleotide
  source 1..22: mol_type = other DNA
acttctcagtgaggctctgtgg

SEQ ID NO: 59 - DNA, 22 bp, synthetic construct
  misc_feature 1..22: note = Synthetic oligonucleotide
  source 1..22: mol_type = other DNA
cttctcagtgaggctctgtggc

SEQ ID NO: 60 - DNA, 22 bp, synthetic construct
  misc_feature 1..22: note = Synthetic oligonucleotide
  source 1..22: mol_type = other DNA
ttctcagtgaggctctgtggct

SEQ ID NO: 61 - DNA, 22 bp, synthetic construct
  misc_feature 1..22: note = Synthetic oligonucleotide
  source 1..22: mol_type = other DNA
tctcagtgaggctctgtggctc

SEQ ID NO: 62 - DNA, 22 bp, synthetic construct
  misc_feature 1..22: note = Synthetic oligonucleotide
  source 1..22: mol_type = other DNA
ctcagtgaggctctgtggctca

SEQ ID NO: 63 - DNA, 22 bp, synthetic construct
  misc_feature 1..22: note = Synthetic oligonucleotide
  source 1..22: mol_type = other DNA
tcagtgaggctctgtggctcac

SEQ ID NO: 64 - DNA, 22 bp, synthetic construct
  misc_feature 1..22: note = Synthetic oligonucleotide
  source 1..22: mol_type = other DNA
cagtgaggctctgtggctcacc

SEQ ID NO: 65 - DNA, 22 bp, synthetic construct
  misc_feature 1..22: note = Synthetic oligonucleotide
  source 1..22: mol_type = other DNA
agtgaggctctgtggctcacct

SEQ ID NO: 66 - DNA, 22 bp, synthetic construct
  misc_feature 1..22: note = Synthetic oligonucleotide
  source 1..22: mol_type = other DNA
gtgaggctctgtggctcaccta

SEQ ID NO: 67 - DNA, 22 bp, synthetic construct
  misc_feature 1..22: note = Synthetic oligonucleotide
  source 1..22: mol_type = other DNA
tgaggctctgtggctcacctaa

SEQ ID NO: 68 - DNA, 22 bp, synthetic construct
  misc_feature 1..22: note = Synthetic oligonucleotide
  source 1..22: mol_type = other DNA
gaggctctgtggctcacctaag

SEQ ID NO: 69 - DNA, 22 bp, synthetic construct
  misc_feature 1..22: note = Synthetic oligonucleotide
  source 1..22: mol_type = other DNA
aggctctgtggctcacctaaga

SEQ ID NO: 70 - DNA, 22 bp, synthetic construct
  misc_feature 1..22: note = Synthetic oligonucleotide
  source 1..22: mol_type = other DNA
ggctctgtggctcacctaagaa

SEQ ID NO: 71 - DNA, 22 bp, synthetic construct
  misc_feature 1..22: note = Synthetic oligonucleotide
  source 1..22: mol_type = other DNA
gctctgtggctcacctaagaaa

SEQ ID NO: 72 - DNA, 22 bp, synthetic construct
  misc_feature 1..22: note = Synthetic oligonucleotide
  source 1..22: mol_type = other DNA
ctctgtggctcacctaagaaac

SEQ ID NO: 73 - DNA, 22 bp, synthetic construct
  misc_feature 1..22: note = Synthetic oligonucleotide
  source 1..22: mol_type = other DNA
tctgtggctcacctaagaaacc

SEQ ID NO: 74 - DNA, 22 bp, synthetic construct
  misc_feature 1..22: note = Synthetic oligonucleotide
  source 1..22: mol_type = other DNA
ctgtggctcacctaagaaacca

SEQ ID NO: 75 - DNA, 22 bp, synthetic construct
  misc_feature 1..22: note = Synthetic oligonucleotide
  source 1..22: mol_type = other DNA
tgtggctcacctaagaaaccag

SEQ ID NO: 76 - DNA, 22 bp, synthetic construct
  misc_feature 1..22: note = Synthetic oligonucleotide
  source 1..22: mol_type = other DNA
gtggctcacctaagaaaccagc

SEQ ID NO: 77 - DNA, 22 bp, synthetic construct
  misc_feature 1..22: note = Synthetic oligonucleotide
  source 1..22: mol_type = other DNA
tggctcacctaagaaaccagcc

SEQ ID NO: 78 - DNA, 22 bp, synthetic construct
  misc_feature 1..22: note = Synthetic oligonucleotide
  source 1..22: mol_type = other DNA
ggctcacctaagaaaccagcct

SEQ ID NO: 79 - DNA, 22 bp, synthetic construct
  misc_feature 1..22: note = Synthetic oligonucleotide
  source 1..22: mol_type = other DNA
gctcacctaagaaaccagcctc

SEQ ID NO: 80 - DNA, 22 bp, synthetic construct
  misc_feature 1..22: note = Synthetic oligonucleotide
  source 1..22: mol_type = other DNA
ctcacctaagaaaccagcctcc

SEQ ID NO: 81 - DNA, 22 bp, synthetic construct
  misc_feature 1..22: note = Synthetic oligonucleotide
  source 1..22: mol_type = other DNA
tcacctaagaaaccagcctccc

SEQ ID NO: 82 - DNA, 22 bp, synthetic construct
  misc_feature 1..22: note = Synthetic oligonucleotide
  source 1..22: mol_type = other DNA
cacctaagaaaccagcctccct

SEQ ID NO: 83 - DNA, 22 bp, synthetic construct
  misc_feature 1..22: note = Synthetic oligonucleotide
  source 1..22: mol_type = other DNA
acctaagaaaccagcctccctt

SEQ ID NO: 84 - DNA, 22 bp, synthetic construct
  misc_feature 1..22: note = Synthetic oligonucleotide
  source 1..22: mol_type = other DNA
cctaagaaaccagcctcccttg

SEQ ID NO: 85 - DNA, 22 bp, synthetic construct
  misc_feature 1..22: note = Synthetic oligonucleotide
  source 1..22: mol_type = other DNA
ctaagaaaccagcctcccttgc

SEQ ID NO: 86 - DNA, 22 bp, synthetic construct
  misc_feature 1..22: note = Synthetic oligonucleotide
  source 1..22: mol_type = other DNA
taagaaaccagcctcccttgca

SEQ ID NO: 87 - DNA, 22 bp, synthetic construct
  misc_feature 1..22: note = Synthetic oligonucleotide
  source 1..22: mol_type = other DNA
aagaaaccagcctcccttgcag

SEQ ID NO: 88 - DNA, 22 bp, synthetic construct
  misc_feature 1..22: note = Synthetic oligonucleotide
  source 1..22: mol_type = other DNA
agaaaccagcctcccttgcagg

SEQ ID NO: 89 - DNA, 22 bp, synthetic construct
  misc_feature 1..22: note = Synthetic oligonucleotide
  source 1..22: mol_type = other DNA
gaaaccagcctcccttgcaggc

SEQ ID NO: 90 - DNA, 22 bp, synthetic construct
  misc_feature 1..22: note = Synthetic oligonucleotide
  source 1..22: mol_type = other DNA
aaaccagcctcccttgcaggca

SEQ ID NO: 91 - DNA, 22 bp, synthetic construct
  misc_feature 1..22: note = Synthetic oligonucleotide
  source 1..22: mol_type = other DNA
aaccagcctcccttgcaggcaa

SEQ ID NO: 92 - DNA, 22 bp, synthetic construct
  misc_feature 1..22: note = Synthetic oligonucleotide
  source 1..22: mol_type = other DNA
accagcctcccttgcaggcaac

SEQ ID NO: 93 - DNA, 22 bp, synthetic construct
  misc_feature 1..22: note = Synthetic oligonucleotide
  source 1..22: mol_type = other DNA
ccagcctcccttgcaggcaacg

SEQ ID NO: 94 - DNA, 22 bp, synthetic construct
  misc_feature 1..22: note = Synthetic oligonucleotide
  source 1..22: mol_type = other DNA
cagcctcccttgcaggcaacgg

SEQ ID NO: 95 - DNA, 22 bp, synthetic construct
  misc_feature 1..22: note = Synthetic oligonucleotide
  source 1..22: mol_type = other DNA
agcctcccttgcaggcaacggc

SEQ ID NO: 96 - DNA, 22 bp, synthetic construct
  misc_feature 1..22: note = Synthetic oligonucleotide
  source 1..22: mol_type = other DNA
cctcccttgcaggcaacggcct

SEQ ID NO: 97 - DNA, 22 bp, synthetic construct
  misc_feature 1..22: note = Synthetic oligonucleotide
  source 1..22: mol_type = other DNA
ctcccttgcaggcaacggccta

SEQ ID NO: 98 - DNA, 22 bp, synthetic construct
  misc_feature 1..22: note = Synthetic oligonucleotide
  source 1..22: mol_type = other DNA
tcccttgcaggcaacggcctag

SEQ ID NO: 99 - DNA, 22 bp, synthetic construct
  misc_feature 1..22: note = Synthetic oligonucleotide
  source 1..22: mol_type = other DNA
cccttgcaggcaacggcctagc

SEQ ID NO: 100 - DNA, 22 bp, synthetic construct
  misc_feature 1..22: note = Synthetic oligonucleotide
  source 1..22: mol_type = other DNA
ccttgcaggcaacggcctagct

SEQ ID NO: 101 - DNA, 22 bp, synthetic construct
  misc_feature 1..22: note = Synthetic oligonucleotide
  source 1..22: mol_type = other DNA
cttgcaggcaacggcctagctg

SEQ ID NO: 102 - DNA, 22 bp, synthetic construct
  misc_feature 1..22: note = Synthetic oligonucleotide
  source 1..22: mol_type = other DNA
ttgcaggcaacggcctagctgg

SEQ ID NO: 103 - DNA, 22 bp, synthetic construct
  misc_feature 1..22: note = Synthetic oligonucleotide
  source 1..22: mol_type = other DNA
tgcaggcaacggcctagctggc

SEQ ID NO: 104 - DNA, 22 bp, synthetic construct
  misc_feature 1..22: note = Synthetic oligonucleotide
  source 1..22: mol_type = other DNA
caggcaacggcctagctggcct

SEQ ID NO: 105 - DNA, 22 bp, synthetic construct
  misc_feature 1..22: note = Synthetic oligonucleotide
  source 1..22: mol_type = other DNA
aggcaacggcctagctggcctg

SEQ ID NO: 106 - DNA, 22 bp, synthetic construct
  misc_feature 1..22: note = Synthetic oligonucleotide
  source 1..22: mol_type = other DNA
gcaacggcctagctggcctggt

SEQ ID NO: 107 - DNA, 22 bp, synthetic construct
  misc_feature 1..22: note = Synthetic oligonucleotide
  source 1..22: mol_type = other DNA
caacggcctagctggcctggtc

SEQ ID NO: 108 - DNA, 22 bp, synthetic construct
  misc_feature 1..22: note = Synthetic oligonucleotide
  source 1..22: mol_type = other DNA
aacggcctagctggcctggtct

SEQ ID NO: 109 - DNA, 22 bp, synthetic construct
  misc_feature 1..22: note = Synthetic oligonucleotide
  source 1..22: mol_type = other DNA
acggcctagctggcctggtctg

SEQ ID NO: 110 - DNA, 22 bp, synthetic construct
  misc_feature 1..22: note = Synthetic oligonucleotide
  source 1..22: mol_type = other DNA
ggcctagctggcctggtctgga

SEQ ID NO: 111 - DNA, 22 bp, synthetic construct
  misc_feature 1..22: note = Synthetic oligonucleotide
  source 1..22: mol_type = other DNA
gcctagctggcctggtctggag

SEQ ID NO: 112 - DNA, 22 bp, synthetic construct
  misc_feature 1..22: note = Synthetic oligonucleotide
  source 1..22: mol_type = other DNA
cctagctggcctggtctggagg

SEQ ID NO: 113 - DNA, 22 bp, synthetic construct
  misc_feature 1..22: note = Synthetic oligonucleotide
  source 1..22: mol_type = other DNA
ctagctggcctggtctggaggc

SEQ ID NO: 114 - DNA, 22 bp, synthetic construct
  misc_feature 1..22: note = Synthetic oligonucleotide
  source 1..22: mol_type = other DNA
tagctggcctggtctggaggct

SEQ ID NO: 115 - DNA, 22 bp, synthetic construct
  misc_feature 1..22: note = Synthetic oligonucleotide
  source 1..22: mol_type = other DNA
agctggcctggtctggaggctc

SEQ ID NO: 116 - DNA, 22 bp, synthetic construct
  misc_feature 1..22: note = Synthetic oligonucleotide
  source 1..22: mol_type = other DNA
gctggcctggtctggaggctct

SEQ ID NO: 117 - DNA, 22 bp, synthetic construct
  misc_feature 1..22: note = Synthetic oligonucleotide
  source 1..22: mol_type = other DNA
ctggcctggtctggaggctctc

SEQ ID NO: 118 - DNA, 22 bp, synthetic construct
  misc_feature 1..22: note = Synthetic oligonucleotide
  source 1..22: mol_type = other DNA
tttacatccacacccaagatac

SEQ ID NO: 119 - DNA, 22 bp, synthetic construct
  misc_feature 1..22: note = Synthetic oligonucleotide
  source 1..22: mol_type = other DNA
tcttgagatttgactcgcatga

SEQ ID NO: 120 - DNA, 22 bp, synthetic construct
  misc_feature 1..22: note = Synthetic oligonucleotide
  source 1..22: mol_type = other DNA
cttgagatttgactcgcatgat

SEQ ID NO: 121 - DNA, 22 bp, synthetic construct
  misc_feature 1..22: note = Synthetic oligonucleotide
  source 1..22: mol_type = other DNA
tgagatttgactcgcatgattg

SEQ ID NO: 122 - DNA, 22 bp, synthetic construct
  misc_feature 1..22: note = Synthetic oligonucleotide
  source 1..22: mol_type = other DNA
gagatttgactcgcatgattgc

SEQ ID NO: 123 - DNA, 22 bp, synthetic construct
  misc_feature 1..22: note = Synthetic oligonucleotide
  source 1..22: mol_type = other DNA
agatttgactcgcatgattgct

SEQ ID NO: 124 - DNA, 22 bp, synthetic construct
  misc_feature 1..22: note = Synthetic oligonucleotide
  source 1..22: mol_type = other DNA
gatttgactcgcatgattgcta

SEQ ID NO: 125 - DNA, 22 bp, synthetic construct
  misc_feature 1..22: note = Synthetic oligonucleotide
  source 1..22: mol_type = other DNA
tttgactcgcatgattgctatg

SEQ ID NO: 126 - DNA, 22 bp, synthetic construct
  misc_feature 1..22: note = Synthetic oligonucleotide
  source 1..22: mol_type = other DNA
ttgactcgcatgattgctatgg

SEQ ID NO: 127 - DNA, 22 bp, synthetic construct
  misc_feature 1..22: note = Synthetic oligonucleotide
  source 1..22: mol_type = other DNA
tgactcgcatgattgctatggg

SEQ ID NO: 128 - DNA, 22 bp, synthetic construct
  misc_feature 1..22: note = Synthetic oligonucleotide
  source 1..22: mol_type = other DNA
gactcgcatgattgctatggga

SEQ ID NO: 129 - DNA, 22 bp, synthetic construct
  misc_feature 1..22: note = Synthetic oligonucleotide
  source 1..22: mol_type = other DNA
actcgcatgattgctatgggac

SEQ ID NO: 130 - DNA, 22 bp, synthetic construct
  misc_feature 1..22: note = Synthetic oligonucleotide
  source 1..22: mol_type = other DNA
ctcgcatgattgctatgggaca

SEQ ID NO: 131 - DNA, 22 bp, synthetic construct
  misc_feature 1..22: note = Synthetic oligonucleotide
  source 1..22: mol_type = other DNA
tcgcatgattgctatgggacaa

SEQ ID NO: 132 - DNA, 22 bp, synthetic construct
  misc_feature 1..22: note = Synthetic oligonucleotide
  source 1..22: mol_type = other DNA
cgcatgattgctatgggacaag

SEQ ID NO: 133 - DNA, 22 bp, synthetic construct
  misc_feature 1..22: note = Synthetic oligonucleotide
  source 1..22: mol_type = other DNA
gcatgattgctatgggacaagt

SEQ ID NO: 134 - DNA, 22 bp, synthetic construct
  misc_feature 1..22: note = Synthetic oligonucleotide
  source 1..22: mol_type = other DNA
catgattgctatgggacaagtt

SEQ ID NO: 135 - DNA, 22 bp, synthetic construct
  misc_feature 1..22: note = Synthetic oligonucleotide
  source 1..22: mol_type = other DNA
gattgctatgggacaagttttc

SEQ ID NO: 136 - DNA, 22 bp, synthetic construct
  misc_feature 1..22: note = Synthetic oligonucleotide
  source 1..22: mol_type = other DNA
tgctatgggacaagttttcatc

SEQ ID NO: 137 - DNA, 22 bp, synthetic construct
  misc_feature 1..22: note = Synthetic oligonucleotide
  source 1..22: mol_type = other DNA
gctatgggacaagttttcatct

SEQ ID NO: 138 - DNA, 22 bp, synthetic construct
  misc_feature 1..22: note = Synthetic oligonucleotide
  source 1..22: mol_type = other DNA
ctatgggacaagttttcatctg

SEQ ID NO: 139 - DNA, 22 bp, synthetic construct
  misc_feature 1..22: note = Synthetic oligonucleotide
  source 1..22: mol_type = other DNA
tatgggacaagttttcatctgc

SEQ ID NO: 140 - DNA, 22 bp, synthetic construct
  misc_feature 1..22: note = Synthetic oligonucleotide
  source 1..22: mol_type = other DNA
atgggacaagttttcatctgca

SEQ ID NO: 141 - DNA, 22 bp, synthetic construct
  misc_feature 1..22: note = Synthetic oligonucleotide
  source 1..22: mol_type = other DNA
tgggacaagttttcatctgcag

SEQ ID NO: 142 - DNA, 22 bp, synthetic construct
  misc_feature 1..22: note = Synthetic oligonucleotide
  source 1..22: mol_type = other DNA
gggacaagttttcatctgcagt

SEQ ID NO: 143 - DNA, 22 bp, synthetic construct
  misc_feature 1..22: note = Synthetic oligonucleotide
  source 1..22: mol_type = other DNA
ggacaagttttcatctgcagtt

SEQ ID NO: 144 - DNA, 22 bp, synthetic construct
  misc_feature 1..22: note = Synthetic oligonucleotide
  source 1..22: mol_type = other DNA
ctgcagtttaaatctgtttccc

SEQ ID NO: 145 - DNA, 22 bp, synthetic construct
  misc_feature 1..22: note = Synthetic oligonucleotide
  source 1..22: mol_type = other DNA
taggggtttggaattctagatc

SEQ ID NO: 146 - DNA, 22 bp, synthetic construct
  misc_feature 1..22: note = Synthetic oligonucleotide
  source 1..22: mol_type = other DNA
aggggtttggaattctagatcg

SEQ ID NO: 147 - DNA, 22 bp, synthetic construct
  misc_feature 1..22: note = Synthetic oligonucleotide
  source 1..22: mol_type = other DNA
ggggtttggaattctagatcgt

SEQ ID NO: 148 - DNA, 22 bp, synthetic construct
  misc_feature 1..22: note = Synthetic oligonucleotide
  source 1..22: mol_type = other DNA
gggtttggaattctagatcgta

SEQ ID NO: 149 - DNA, 22 bp, synthetic construct
  misc_feature 1..22: note = Synthetic oligonucleotide
  source 1..22: mol_type = other DNA
gatcgtatttgaagtgttggtg

SEQ ID NO: 150 - DNA, 22 bp, synthetic construct
  misc_feature 1..22: note = Synthetic oligonucleotide
  source 1..22: mol_type = other DNA
atcgtatttgaagtgttggtgc

SEQ ID NO: 151 - DNA, 22 bp, synthetic construct
  misc_feature 1..22: note = Synthetic oligonucleotide
  source 1..22: mol_type = other DNA
tcgtatttgaagtgttggtgcc

SEQ ID NO: 152 - DNA, 22 bp, synthetic construct
  misc_feature 1..22: note = Synthetic oligonucleotide
  source 1..22: mol_type = other DNA
cgtatttgaagtgttggtgcca

SEQ ID NO: 153 - DNA, 22 bp, synthetic construct
  misc_feature 1..22: note = Synthetic oligonucleotide
  source 1..22: mol_type = other DNA
gtatttgaagtgttggtgccac

SEQ ID NO: 154 - DNA, 22 bp, synthetic construct
  misc_feature 1..22: note = Synthetic oligonucleotide
  source 1..22: mol_type = other DNA
tatttgaagtgttggtgccaca

SEQ ID NO: 155 - DNA, 22 bp, synthetic construct
  misc_feature 1..22: note = Synthetic oligonucleotide
  source 1..22: mol_type = other DNA
atttgaagtgttggtgccacac

SEQ ID NO: 156 - DNA, 22 bp, synthetic construct
  misc_feature 1..22: note = Synthetic oligonucleotide
  source 1..22: mol_type = other DNA
cacaccttaacacctgcacgct

SEQ ID NO: 157 - DNA, 22 bp, synthetic construct
  misc_feature 1..22: note = Synthetic oligonucleotide
  source 1..22: mol_type = other DNA
acaccttaacacctgcacgctg

SEQ ID NO: 158 - DNA, 22 bp, synthetic construct
  misc_feature 1..22: note = Synthetic oligonucleotide
  source 1..22: mol_type = other DNA
caccttaacacctgcacgctgg

SEQ ID NO: 159 - DNA, 22 bp, synthetic construct
  misc_feature 1..22: note = Synthetic oligonucleotide
  source 1..22: mol_type = other DNA
accttaacacctgcacgctggc

SEQ ID NO: 160 - DNA, 22 bp, synthetic construct
  misc_feature 1..22: note = Synthetic oligonucleotide
  source 1..22: mol_type = other DNA
ccttaacacctgcacgctggca

SEQ ID NO: 161 - DNA, 22 bp, synthetic construct
  misc_feature 1..22: note = Synthetic oligonucleotide
  source 1..22: mol_type = other DNA
cttaacacctgcacgctggcaa

SEQ ID NO: 162 - DNA, 22 bp, synthetic construct
  misc_feature 1..22: note = Synthetic oligonucleotide
  source 1..22: mol_type = other DNA
ttaacacctgcacgctggcaac

SEQ ID NO: 163 - DNA, 22 bp, synthetic construct
  misc_feature 1..22: note = Synthetic oligonucleotide
  source 1..22: mol_type = other DNA
taacacctgcacgctggcaaca

SEQ ID NO: 164 - DNA, 22 bp, synthetic construct
  misc_feature 1..22: note = Synthetic oligonucleotide
  source 1..22: mol_type = other DNA
aacacctgcacgctggcaacaa

SEQ ID NO: 165 - DNA, 22 bp, synthetic construct
  misc_feature 1..22: note = Synthetic oligonucleotide
  source 1..22: mol_type = other DNA
acacctgcacgctggcaacaaa

SEQ ID NO: 166 - DNA, 22 bp, synthetic construct
  misc_feature 1..22: note = Synthetic oligonucleotide
  source 1..22: mol_type = other DNA
cacctgcacgctggcaacaaaa

SEQ ID NO: 167 - DNA, 22 bp, synthetic construct
  misc_feature 1..22: note = Synthetic oligonucleotide
  source 1..22: mol_type = other DNA
acctgcacgctggcaacaaaac

SEQ ID NO: 168 - DNA, 22 bp, synthetic construct
  misc_feature 1..22: note = Synthetic oligonucleotide
  source 1..22: mol_type = other DNA
cctgcacgctggcaacaaaacc

SEQ ID NO: 169 - DNA, 22 bp, synthetic construct
  misc_feature 1..22: note = Synthetic oligonucleotide
  source 1..22: mol_type = other DNA
ctgcacgctggcaacaaaaccg

SEQ ID NO: 170 - DNA, 22 bp, synthetic construct
  misc_feature 1..22: note = Synthetic oligonucleotide
  source 1..22: mol_type = other DNA
tgcacgctggcaacaaaaccgt

SEQ ID NO: 171 - DNA, 22 bp, synthetic construct
  misc_feature 1..22: note = Synthetic oligonucleotide
  source 1..22: mol_type = other DNA
gcacgctggcaacaaaaccgtc

SEQ ID NO: 172 - DNA, 22 bp, synthetic construct
  misc_feature 1..22: note = Synthetic oligonucleotide
  source 1..22: mol_type = other DNA
cacgctggcaacaaaaccgtcc

SEQ ID NO: 173 - DNA, 22 bp, synthetic construct
  misc_feature 1..22: note = Synthetic oligonucleotide
  source 1..22: mol_type = other DNA
acgctggcaacaaaaccgtccg

SEQ ID NO: 174 - DNA, 22 bp, synthetic construct
  misc_feature 1..22: note = Synthetic oligonucleotide
  source 1..22: mol_type = other DNA
cgctggcaacaaaaccgtccgc

SEQ ID NO: 175 - DNA, 22 bp, synthetic construct
  misc_feature 1..22: note = Synthetic oligonucleotide
  source 1..22: mol_type = other DNA
gctggcaacaaaaccgtccgct

SEQ ID NO: 176 - DNA, 22 bp, synthetic construct
  misc_feature 1..22: note = Synthetic oligonucleotide
  source 1..22: mol_type = other DNA
ctggcaacaaaaccgtccgctc

SEQ ID NO: 177 - DNA, 22 bp, synthetic construct
  misc_feature 1..22: note = Synthetic oligonucleotide
  source 1..22: mol_type = other DNA
tggcaacaaaaccgtccgctct

SEQ ID NO: 178 - DNA, 22 bp, synthetic construct
  misc_feature 1..22: note = Synthetic oligonucleotide
  source 1..22: mol_type = other DNA
ggcaacaaaaccgtccgctctg

SEQ ID NO: 179 - DNA, 22 bp, synthetic construct
  misc_feature 1..22: note = Synthetic oligonucleotide
  source 1..22: mol_type = other DNA
gcaacaaaaccgtccgctctgc

SEQ ID NO: 180 - DNA, 22 bp, synthetic construct
  misc_feature 1..22: note = Synthetic oligonucleotide
  source 1..22: mol_type = other DNA
caacaaaaccgtccgctctgca

SEQ ID NO: 181 - DNA, 22 bp, synthetic construct
  misc_feature 1..22: note = Synthetic oligonucleotide
  source 1..22: mol_type = other DNA
aacaaaaccgtccgctctgcag

SEQ ID NO: 182 - DNA, 22 bp, synthetic construct
  misc_feature 1..22: note = Synthetic oligonucleotide
  source 1..22: mol_type = other DNA
acaaaaccgtccgctctgcagc

SEQ ID NO: 183 - DNA, 22 bp, synthetic construct
  misc_feature 1..22: note = Synthetic oligonucleotide
  source 1..22: mol_type = other DNA
caaaaccgtccgctctgcagca

SEQ ID NO: 184 - DNA, 22 bp, synthetic construct
  misc_feature 1..22: note = Synthetic oligonucleotide
  source 1..22: mol_type = other DNA
aaaaccgtccgctctgcagcac

SEQ ID NO: 185 - DNA, 22 bp, synthetic construct
  misc_feature 1..22: note = Synthetic oligonucleotide
  source 1..22: mol_type = other DNA
aaaccgtccgctctgcagcaca

SEQ ID NO: 186 - DNA, 22 bp, synthetic construct
  misc_feature 1..22: note = Synthetic oligonucleotide
  source 1..22: mol_type = other DNA
aaccgtccgctctgcagcacag

SEQ ID NO: 187 - DNA, 22 bp, synthetic construct
  misc_feature 1..22: note = Synthetic oligonucleotide
  source 1..22: mol_type = other DNA
accgtccgctctgcagcacagc

SEQ ID NO: 188 - DNA, 22 bp, synthetic construct
  misc_feature 1..22: note = Synthetic oligonucleotide
  source 1..22: mol_type = other DNA
ccgtccgctctgcagcacagct

SEQ ID NO: 189 - DNA, 22 bp, synthetic construct
  misc_feature 1..22: note = Synthetic oligonucleotide
  source 1..22: mol_type = other DNA
cgtccgctctgcagcacagctg

SEQ ID NO: 190 - DNA, 22 bp, synthetic construct
  misc_feature 1..22: note = Synthetic oligonucleotide
  source 1..22: mol_type = other DNA
gtccgctctgcagcacagctgg

SEQ ID NO: 191 - DNA, 22 bp, synthetic construct
  misc_feature 1..22: note = Synthetic oligonucleotide
  source 1..22: mol_type = other DNA
tccgctctgcagcacagctggg

SEQ ID NO: 192 - DNA, 22 bp, synthetic construct
  misc_feature 1..22: note = Synthetic oligonucleotide
  source 1..22: mol_type = other DNA
cgctctgcagcacagctggggt

SEQ ID NO: 193 - DNA, 22 bp, synthetic construct
  misc_feature 1..22: note = Synthetic oligonucleotide
  source 1..22: mol_type = other DNA
gctctgcagcacagctggggtc

SEQ ID NO: 194 - DNA, 22 bp, synthetic construct
  misc_feature 1..22: note = Synthetic oligonucleotide
  source 1..22: mol_type = other DNA
ctctgcagcacagctggggtca

SEQ ID NO: 195 - DNA, 22 bp, synthetic construct
  misc_feature 1..22: note = Synthetic oligonucleotide
  source 1..22: mol_type = other DNA
tctgcagcacagctggggtcac

SEQ ID NO: 196 - DNA, 22 bp, synthetic construct
  misc_feature 1..22: note = Synthetic oligonucleotide
  source 1..22: mol_type = other DNA
ctgcagcacagctggggtcacc

SEQ ID NO: 197 - DNA, 22 bp, synthetic construct
  misc_feature 1..22: note = Synthetic oligonucleotide
  source 1..22: mol_type = other DNA
tgcagcacagctggggtcacct

SEQ ID NO: 198 - DNA, 22 bp, synthetic construct
  misc_feature 1..22: note = Synthetic oligonucleotide
  source 1..22: mol_type = other DNA
gcagcacagctggggtcacctg

SEQ ID NO: 199 - DNA, 22 bp, synthetic construct
  misc_feature 1..22: note = Synthetic oligonucleotide
  source 1..22: mol_type = other DNA
cagcacagctggggtcacctga

SEQ ID NO: 200 - DNA, 22 bp, synthetic construct
  misc_feature 1..22: note = Synthetic oligonucleotide
  source 1..22: mol_type = other DNA
agcacagctggggtcacctgac

SEQ ID NO: 201 - DNA, 22 bp, synthetic construct
  misc_feature 1..22: note = Synthetic oligonucleotide
  source 1..22: mol_type = other DNA
gcacagctggggtcacctgacc

SEQ ID NO: 202 - DNA, 22 bp, synthetic construct
  misc_feature 1..22: note = Synthetic oligonucleotide
  source 1..22: mol_type = other DNA
cacagctggggtcacctgacct

SEQ ID NO: 203 - DNA, 22 bp, synthetic construct
  misc_feature 1..22: note = Synthetic oligonucleotide
  source 1..22: mol_type = other DNA
acagctggggtcacctgacctt

SEQ ID NO: 204 - DNA, 22 bp, synthetic construct
  misc_feature 1..22: note = Synthetic oligonucleotide
  source 1..22: mol_type = other DNA
cagctggggtcacctgaccttt

SEQ ID NO: 205 - DNA, 22 bp, synthetic construct
  misc_feature 1..22: note = Synthetic oligonucleotide
  source 1..22: mol_type = other DNA
agctggggtcacctgacctttc

SEQ ID NO: 206 - DNA, 22 bp, synthetic construct
  misc_feature 1..22: note = Synthetic oligonucleotide
  source 1..22: mol_type = other DNA
gctggggtcacctgacctttct

SEQ ID NO: 207 - DNA, 22 bp, synthetic construct
  misc_feature 1..22: note = Synthetic oligonucleotide
  source 1..22: mol_type = other DNA
ctggggtcacctgacctttctc

SEQ ID NO: 208 - DNA, 22 bp, synthetic construct
  misc_feature 1..22: note = Synthetic oligonucleotide
  source 1..22: mol_type = other DNA
tggggtcacctgacctttctcc

SEQ ID NO: 209 - DNA, 22 bp, synthetic construct
  misc_feature 1..22: note = Synthetic oligonucleotide
  source 1..22: mol_type = other DNA
ggggtcacctgacctttctcct

SEQ ID NO: 210 - DNA, 22 bp, synthetic construct
  misc_feature 1..22: note = Synthetic oligonucleotide
  source 1..22: mol_type = other DNA
gggtcacctgacctttctcctg

SEQ ID NO: 211 - DNA, 22 bp, synthetic construct
  misc_feature 1..22: note = Synthetic oligonucleotide
  source 1..22: mol_type = other DNA
ggtcacctgacctttctcctgt

SEQ ID NO: 212 - DNA, 22 bp, synthetic construct
  misc_feature 1..22: note = Synthetic oligonucleotide
  source 1..22: mol_type = other DNA
gtcacctgacctttctcctgtc

SEQ ID NO: 213 - DNA, 22 bp, synthetic construct
  misc_feature 1..22: note = Synthetic oligonucleotide
  source 1..22: mol_type = other DNA
tcacctgacctttctcctgtcc

SEQ ID NO: 214 - DNA, 22 bp, synthetic construct
  misc_feature 1..22: note = Synthetic oligonucleotide
  source 1..22: mol_type = other DNA
cacctgacctttctcctgtccc

SEQ ID NO: 215 - DNA, 22 bp, synthetic construct
  misc_feature 1..22: note = Synthetic oligonucleotide
  source 1..22: mol_type = other DNA
ccccacttgagctcagtggctg

SEQ ID NO: 216 - DNA, 22 bp, synthetic construct
  misc_feature 1..22: note = Synthetic oligonucleotide
  source 1..22: mol_type = other DNA
cccacttgagctcagtggctgg

SEQ ID NO: 217 - DNA, 22 bp, synthetic construct
  misc_feature 1..22: note = Synthetic oligonucleotide
  source 1..22: mol_type = other DNA
ccacttgagctcagtggctggg

SEQ ID NO: 218 - DNA, 22 bp, synthetic construct
  misc_feature 1..22: note = Synthetic oligonucleotide
  source 1..22: mol_type = other DNA
cacttgagctcagtggctgggc

SEQ ID NO: 219 - DNA, 22 bp, synthetic construct
  misc_feature 1..22: note = Synthetic oligonucleotide
  source 1..22: mol_type = other DNA
acttgagctcagtggctgggca

SEQ ID NO: 220 - DNA, 22 bp, synthetic construct
  misc_feature 1..22: note = Synthetic oligonucleotide
  source 1..22: mol_type = other DNA
cttgagctcagtggctgggcag

SEQ ID NO: 221 - DNA, 22 bp, synthetic construct
  misc_feature 1..22: note = Synthetic oligonucleotide
  source 1..22: mol_type = other DNA
ttgagctcagtggctgggcagc

SEQ ID NO: 222 - DNA, 22 bp, synthetic construct
  misc_feature 1..22: note = Synthetic oligonucleotide
  source 1..22: mol_type = other DNA
tgagctcagtggctgggcagca

SEQ ID NO: 223 - DNA, 22 bp, synthetic construct
  misc_feature 1..22: note = Synthetic oligonucleotide
  source 1..22: mol_type = other DNA
gagctcagtggctgggcagcag

SEQ ID NO: 224 - DNA, 22 bp, synthetic construct
  misc_feature 1..22: note = Synthetic oligonucleotide
  source 1..22: mol_type = other DNA
agctcagtggctgggcagcagg

SEQ ID NO: 225 - DNA, 22 bp, synthetic construct
  misc_feature 1..22: note = Synthetic oligonucleotide
  source 1..22: mol_type = other DNA
tcagtggctgggcagcagggga

SEQ ID NO: 226 - DNA, 22 bp, synthetic construct
  misc_feature 1..22: note = Synthetic oligonucleotide
  source 1..22: mol_type = other DNA
cagtggctgggcagcaggggat

SEQ ID NO: 227 - DNA, 22 bp, synthetic construct
  misc_feature 1..22: note = Synthetic oligonucleotide
  source 1..22: mol_type = other DNA
agtggctgggcagcaggggatg

SEQ ID NO: 228 - DNA, 22 bp, synthetic construct
  misc_feature 1..22: note = Synthetic oligonucleotide
  source 1..22: mol_type = other DNA
tggctgggcagcaggggatgca

SEQ ID NO: 229 - DNA, 22 bp, synthetic construct
  misc_feature 1..22: note = Synthetic oligonucleotide
  source 1..22: mol_type = other DNA
ggctgggcagcaggggatgcat

SEQ ID NO: 230 - DNA, 22 bp, synthetic construct
  misc_feature 1..22: note = Synthetic oligonucleotide
  source 1..22: mol_type = other DNA
gctgggcagcaggggatgcatg

SEQ ID NO: 231 - DNA, 22 bp, synthetic construct
  misc_feature 1..22: note = Synthetic oligonucleotide
  source 1..22: mol_type = other DNA
ctgggcagcaggggatgcatgg

SEQ ID NO: 232 - DNA, 22 bp, synthetic construct
  misc_feature 1..22: note = Synthetic oligonucleotide
  source 1..22: mol_type = other DNA
tgggcagcaggggatgcatggc

SEQ ID NO: 233 - DNA, 22 bp, synthetic construct
  misc_feature 1..22: note = Synthetic oligonucleotide
  source 1..22: mol_type = other DNA
ggcagcaggggatgcatggcca

SEQ ID NO: 234 - DNA, 22 bp, synthetic construct
  misc_feature 1..22: note = Synthetic oligonucleotide
  source 1..22: mol_type = other DNA
gcagcaggggatgcatggccac

SEQ ID NO: 235 - DNA, 22 bp, synthetic construct
  misc_feature 1..22: note = Synthetic oligonucleotide
  source 1..22: mol_type = other DNA
cagcaggggatgcatggccact

SEQ ID NO: 236 - DNA, 22 bp, synthetic construct
  misc_feature 1..22: note = Synthetic oligonucleotide
  source 1..22: mol_type = other DNA
agcaggggatgcatggccactg

SEQ ID NO: 237 - DNA, 22 bp, synthetic construct
  misc_feature 1..22: note = Synthetic oligonucleotide
  source 1..22: mol_type = other DNA
gcaggggatgcatggccactgg

SEQ ID NO: 238 - DNA, 22 bp, synthetic construct
  misc_feature 1..22: note = Synthetic oligonucleotide
  source 1..22: mol_type = other DNA
caggggatgcatggccactggc

SEQ ID NO: 239 - DNA, 22 bp, synthetic construct
  misc_feature 1..22: note = Synthetic oligonucleotide
  source 1..22: mol_type = other DNA
aggggatgcatggccactggcc

SEQ ID NO: 240 - DNA, 22 bp, synthetic construct
  misc_feature 1..22: note = Synthetic oligonucleotide
  source 1..22: mol_type = other DNA
atgcatggccactggccggcca

SEQ ID NO: 241 - DNA, 22 bp, synthetic construct
  misc_feature 1..22: note = Synthetic oligonucleotide
  source 1..22: mol_type = other DNA
cggccaggtgcagctctcagct

SEQ ID NO: 242 - DNA, 22 bp, synthetic construct
  misc_feature 1..22: note = Synthetic oligonucleotide
  source 1..22: mol_type = other DNA
ggccaggtgcagctctcagctg

SEQ ID NO: 243 - DNA, 22 bp, synthetic construct
  misc_feature 1..22: note = Synthetic oligonucleotide
  source 1..22: mol_type = other DNA
gccaggtgcagctctcagctgg

SEQ ID NO: 244 - DNA, 22 bp, synthetic construct
  misc_feature 1..22: note = Synthetic oligonucleotide
  source 1..22: mol_type = other DNA
ccaggtgcagctctcagctggg

SEQ ID NO: 245 - DNA, 22 bp, synthetic construct
  misc_feature 1..22: note = Synthetic oligonucleotide
  source 1..22: mol_type = other DNA
caggtgcagctctcagctgggg

SEQ ID NO: 246 - DNA, 22 bp, synthetic construct
  misc_feature 1..22: note = Synthetic oligonucleotide
  source 1..22: mol_type = other DNA
aggtgcagctctcagctggggt

SEQ ID NO: 247 - DNA, 22 bp, synthetic construct
  misc_feature 1..22: note = Synthetic oligonucleotide
  source 1..22: mol_type = other DNA
ggtgcagctctcagctggggtg

SEQ ID NO: 248 - DNA, 22 bp, synthetic construct
  misc_feature 1..22: note = Synthetic oligonucleotide
  source 1..22: mol_type = other DNA
gtgcagctctcagctggggtgt

SEQ ID NO: 249 - DNA, 22 bp, synthetic construct
  misc_feature 1..22: note = Synthetic oligonucleotide
  source 1..22: mol_type = other DNA
tgcagctctcagctggggtgtt

SEQ ID NO: 250 - DNA, 22 bp, synthetic construct
  misc_feature 1..22: note = Synthetic oligonucleotide
  source 1..22: mol_type = other DNA
gcagctctcagctggggtgttc

SEQ ID NO: 251 - DNA, 22 bp, synthetic construct
  misc_feature 1..22: note = Synthetic oligonucleotide
  source 1..22: mol_type = other DNA
cagctctcagctggggtgttca

SEQ ID NO: 252 - DNA, 22 bp, synthetic construct
  misc_feature 1..22: note = Synthetic oligonucleotide
  source 1..22: mol_type = other DNA
agctctcagctggggtgttcag

SEQ ID NO: 253 - DNA, 22 bp, synthetic construct
  misc_feature 1..22: note = Synthetic oligonucleotide
  source 1..22: mol_type = other DNA
gctctcagctggggtgttcaga

SEQ ID NO: 254 - DNA, 22 bp, synthetic construct
  misc_feature 1..22: note = Synthetic oligonucleotide
  source 1..22: mol_type = other DNA
ctctcagctggggtgttcagag

SEQ ID NO: 255 - DNA, 22 bp, synthetic construct
  misc_feature 1..22: note = Synthetic oligonucleotide
  source 1..22: mol_type = other DNA
tctcagctggggtgttcagagg

SEQ ID NO: 256 - DNA, 22 bp, synthetic construct
  misc_feature 1..22: note = Synthetic oligonucleotide
  source 1..22: mol_type = other DNA
ctcagctggggtgttcagagga

SEQ ID NO: 257 - DNA, 22 bp, synthetic construct
  misc_feature 1..22: note = Synthetic oligonucleotide
  source 1..22: mol_type = other DNA
tcagctggggtgttcagaggac

SEQ ID NO: 258 - DNA, 22 bp, synthetic construct
  misc_feature 1..22: note = Synthetic oligonucleotide
  source 1..22: mol_type = other DNA
cagctggggtgttcagaggacg

SEQ ID NO: 259 - DNA, 22 bp, synthetic construct
  misc_feature 1..22: note = Synthetic oligonucleotide
  source 1..22: mol_type = other DNA
agctggggtgttcagaggacgc

SEQ ID NO: 260 - DNA, 22 bp, synthetic construct
  misc_feature 1..22: note = Synthetic oligonucleotide
  source 1..22: mol_type = other DNA
gctggggtgttcagaggacgcc

SEQ ID NO: 261 - DNA, 22 bp, synthetic construct
  misc_feature 1..22: note = Synthetic oligonucleotide
  source 1..22: mol_type = other DNA
ctggggtgttcagaggacgcct

SEQ ID NO: 262 - DNA, 22 bp, synthetic construct
  misc_feature 1..22: note = Synthetic oligonucleotide
  source 1..22: mol_type = other DNA
tggggtgttcagaggacgcctg

SEQ ID NO: 263 - DNA, 22 bp, synthetic construct
  misc_feature 1..22: note = Synthetic oligonucleotide
  source 1..22: mol_type = other DNA
ggggtgttcagaggacgcctgt

SEQ ID NO: 264 - DNA, 22 bp, synthetic construct
  misc_feature 1..22: note = Synthetic oligonucleotide
  source 1..22: mol_type = other DNA
gggtgttcagaggacgcctgtg

SEQ ID NO: 265 - DNA, 22 bp, synthetic construct
  misc_feature 1..22: note = Synthetic oligonucleotide
  source 1..22: mol_type = other DNA
ggtgttcagaggacgcctgtgt

SEQ ID NO: 266 - DNA, 22 bp, synthetic construct
  misc_feature 1..22: note = Synthetic oligonucleotide
  source 1..22: mol_type = other DNA
gtgttcagaggacgcctgtgtc

SEQ ID NO: 267 - DNA, 22 bp, synthetic construct
  misc_feature 1..22: note = Synthetic oligonucleotide
  source 1..22: mol_type = other DNA
tgttcagaggacgcctgtgtcc

SEQ ID NO: 268 - DNA, 22 bp, synthetic construct
  misc_feature 1..22: note = Synthetic oligonucleotide
  source 1..22: mol_type = other DNA
gttcagaggacgcctgtgtcct

SEQ ID NO: 269 - DNA, 22 bp, synthetic construct
  misc_feature 1..22: note = Synthetic oligonucleotide
  source 1..22: mol_type = other DNA
ttcagaggacgcctgtgtcctc

SEQ ID NO: 270 - DNA, 22 bp, synthetic construct
  misc_feature 1..22: note = Synthetic oligonucleotide
  source 1..22: mol_type = other DNA
tcagaggacgcctgtgtcctcc

SEQ ID NO: 271 - DNA, 22 bp, synthetic construct
  misc_feature 1..22: note = Synthetic oligonucleotide
  source 1..22: mol_type = other DNA
cagaggacgcctgtgtcctccc

SEQ ID NO: 272 - DNA, 22 bp, synthetic construct
  misc_feature 1..22: note = Synthetic oligonucleotide
  source 1..22: mol_type = other DNA
agaggacgcctgtgtcctcccc

SEQ ID NO: 273 - DNA, 22 bp, synthetic construct
  misc_feature 1..22: note = Synthetic oligonucleotide
  source 1..22: mol_type = other DNA
gaggacgcctgtgtcctcccct

SEQ ID NO: 274 - DNA, 22 bp, synthetic construct
  misc_feature 1..22: note = Synthetic oligonucleotide
  source 1..22: mol_type = other DNA
aggacgcctgtgtcctcccctc

SEQ ID NO: 275 - DNA, 22 bp, synthetic construct
  misc_feature 1..22: note = Synthetic oligonucleotide
  source 1..22: mol_type = other DNA
ctctgtcacccttggaggcaga

SEQ ID NO: 276 - DNA, 22 bp, synthetic construct
  misc_feature 1..22: note = Synthetic oligonucleotide
  source 1..22: mol_type = other DNA
tctgtcacccttggaggcagag

SEQ ID NO: 277 - DNA, 22 bp, synthetic construct
  misc_feature 1..22: note = Synthetic oligonucleotide
  source 1..22: mol_type = other DNA
ctgtcacccttggaggcagaga

SEQ ID NO: 278 - DNA, 22 bp, synthetic construct
  misc_feature 1..22: note = Synthetic oligonucleotide
  source 1..22: mol_type = other DNA
tgtcacccttggaggcagagaa

SEQ ID NO: 279 - DNA, 22 bp, synthetic construct
  misc_feature 1..22: note = Synthetic oligonucleotide
  source 1..22: mol_type = other DNA
gtcacccttggaggcagagaac

SEQ ID NO: 280 - DNA, 22 bp, synthetic construct
  misc_feature 1..22: note = Synthetic oligonucleotide
  source 1..22: mol_type = other DNA
tcacccttggaggcagagaact

SEQ ID NO: 281 - DNA, 22 bp, synthetic construct
  misc_feature 1..22: note = Synthetic oligonucleotide
  source 1..22: mol_type = other DNA
cacccttggaggcagagaactt

SEQ ID NO: 282 - DNA, 22 bp, synthetic construct
  misc_feature 1..22: note = Synthetic oligonucleotide
  source 1..22: mol_type = other DNA
acccttggaggcagagaacttt

SEQ ID NO: 283 - DNA, 22 bp, synthetic construct
  misc_feature 1..22: note = Synthetic oligonucleotide
  source 1..22: mol_type = other DNA
cccttggaggcagagaactttg

SEQ ID NO: 284 - DNA, 22 bp, synthetic construct
  misc_feature 1..22: note = Synthetic oligonucleotide
  source 1..22: mol_type = other DNA
ccttggaggcagagaactttgc

SEQ ID NO: 285 - DNA, 22 bp, synthetic construct
  misc_feature 1..22: note = Synthetic oligonucleotide
  source 1..22: mol_type = other DNA
cttggaggcagagaactttgcc

SEQ ID NO: 286 - DNA, 22 bp, synthetic construct
  misc_feature 1..22: note = Synthetic oligonucleotide
  source 1..22: mol_type = other DNA
ttggaggcagagaactttgccc

SEQ ID NO: 287 - RNA, 22 nt, synthetic construct
  misc_feature 1..22: note = Synthetic oligonucleotide
  source 1..22: mol_type = other RNA
cgtaagatgtggaccgctggag

SEQ ID NO: 288 - RNA, 22 nt, synthetic construct
  misc_feature 1..22: note = Synthetic oligonucleotide
  source 1..22: mol_type = other RNA
gtaagatgtggaccgctggaga

SEQ ID NO: 289 - RNA, 22 nt, synthetic construct
  misc_feature 1..22: note = Synthetic oligonucleotide
  source 1..22: mol_type = other RNA
taagatgtggaccgctggagaa

SEQ ID NO: 290 - RNA, 22 nt, synthetic construct
  misc_feature 1..22: note = Synthetic oligonucleotide
  source 1..22: mol_type = other RNA
aagatgtggaccgctggagaat

SEQ ID NO: 291 - RNA, 22 nt, synthetic construct
  misc_feature 1..22: note = Synthetic oligonucleotide
  source 1..22: mol_type = other RNA
agatgtggaccgctggagaatg

SEQ ID NO: 292 - RNA, 22 nt, synthetic construct
  misc_feature 1..22: note = Synthetic oligonucleotide
  source 1..22: mol_type = other RNA
gatgtggaccgctggagaatgg

SEQ ID NO: 293 - RNA, 22 nt, synthetic construct
  misc_feature 1..22: note = Synthetic oligonucleotide
  source 1..22: mol_type = other RNA
atgtggaccgctggagaatggg

SEQ ID NO: 294 - RNA, 22 nt, synthetic construct
  misc_feature 1..22: note = Synthetic oligonucleotide
  source 1..22: mol_type = other RNA
tgtggaccgctggagaatgggg

SEQ ID NO: 295 - RNA, 22 nt, synthetic construct
  misc_feature 1..22: note = Synthetic oligonucleotide
  source 1..22: mol_type = other RNA
ggggtgctgcctgcagtcaaaa

SEQ ID NO: 296 - RNA, 22 nt, synthetic construct
  misc_feature 1..22: note = Synthetic oligonucleotide
  source 1..22: mol_type = other RNA
gggtgctgcctgcagtcaaaac

SEQ ID NO: 297 - RNA, 22 nt, synthetic construct
  misc_feature 1..22: note = Synthetic oligonucleotide
  source 1..22: mol_type = other RNA
ggtgctgcctgcagtcaaaacg

SEQ ID NO: 298 - RNA, 22 nt, synthetic construct
  misc_feature 1..22: note = Synthetic oligonucleotide
  source 1..22: mol_type = other RNA
gtgctgcctgcagtcaaaacgg

SEQ ID NO: 299 - RNA, 22 nt, synthetic construct
  misc_feature 1..22: note = Synthetic oligonucleotide
  source 1..22: mol_type = other RNA
tgctgcctgcagtcaaaacgga

SEQ ID NO: 300 - RNA, 22 nt, synthetic construct
  misc_feature 1..22: note = Synthetic oligonucleotide
  source 1..22: mol_type = other RNA
gctgcctgcagtcaaaacggag

SEQ ID NO: 301 - RNA, 22 nt, synthetic construct
  misc_feature 1..22: note = Synthetic oligonucleotide
  source 1..22: mol_type = other RNA
ctgcctgcagtcaaaacggagt

SEQ ID NO: 302 - RNA, 22 nt, synthetic construct
  misc_feature 1..22: note = Synthetic oligonucleotide
  source 1..22: mol_type = other RNA
tgcctgcagtcaaaacggagtg

SEQ ID NO: 303 - RNA, 22 nt, synthetic construct
  misc_feature 1..22: note = Synthetic oligonucleotide
  source 1..22: mol_type = other RNA
gcctgcagtcaaaacggagtgg

SEQ ID NO: 304 - RNA, 22 nt, synthetic construct
  misc_feature 1..22: note = Synthetic oligonucleotide
  source 1..22: mol_type = other RNA
cctgcagtcaaaacggagtggg

SEQ ID NO: 305 - RNA, 22 nt, synthetic construct
  misc_feature 1..22: note = Synthetic oligonucleotide
  source 1..22: mol_type = other RNA
ctgcagtcaaaacggagtgggg

SEQ ID NO: 306 - RNA, 22 nt, synthetic construct
  misc_feature 1..22: note = Synthetic oligonucleotide
  source 1..22: mol_type = other RNA
ggtgcccagctcagggccagaa

SEQ ID NO: 307 - RNA, 22 nt, synthetic construct
  misc_feature 1..22: note = Synthetic oligonucleotide
  source 1..22: mol_type = other RNA
gtgcccagctcagggccagaat

SEQ ID NO: 308 - RNA, 22 nt, synthetic construct
  misc_feature 1..22: note = Synthetic oligonucleotide
  source 1..22: mol_type = other RNA
tgcccagctcagggccagaatg

SEQ ID NO: 309 - RNA, 22 nt, synthetic construct
  misc_feature 1..22: note = Synthetic oligonucleotide
  source 1..22: mol_type = other RNA
gcccagctcagggccagaatga

SEQ ID NO: 310 - RNA, 22 nt, synthetic construct
  misc_feature 1..22: note = Synthetic oligonucleotide
  source 1..22: mol_type = other RNA
cccagctcagggccagaatgat

SEQ ID NO: 311 - RNA, 22 nt, synthetic construct
  misc_feature 1..22: note = Synthetic oligonucleotide
  source 1..22: mol_type = other RNA
ccagctcagggccagaatgatc

SEQ ID NO: 312 - RNA, 22 nt, synthetic construct
  misc_feature 1..22: note = Synthetic oligonucleotide
  source 1..22: mol_type = other RNA
cagctcagggccagaatgatcc

SEQ ID NO: 313 - RNA, 22 nt, synthetic construct
  misc_feature 1..22: note = Synthetic oligonucleotide
  source 1..22: mol_type = other RNA
agctcagggccagaatgatcct

SEQ ID NO: 314 - RNA, 22 nt, synthetic construct
  misc_feature 1..22: note = Synthetic oligonucleotide
  source 1..22: mol_type = other RNA
gctcagggccagaatgatccta

SEQ ID NO: 315 - RNA, 22 nt, synthetic construct
  misc_feature 1..22: note = Synthetic oligonucleotide
  source 1..22: mol_type = other RNA
ctcagggccagaatgatcctat

SEQ ID NO: 316 - RNA, 22 nt, synthetic construct
  misc_feature 1..22: note = Synthetic oligonucleotide
  source 1..22: mol_type = other RNA
tcagggccagaatgatcctatt

SEQ ID NO: 317 - RNA, 22 nt, synthetic construct
  misc_feature 1..22: note = Synthetic oligonucleotide
  source 1..22: mol_type = other RNA
cagggccagaatgatcctattc

SEQ ID NO: 318 - RNA, 22 nt, synthetic construct
  misc_feature 1..22: note = Synthetic oligonucleotide
  source 1..22: mol_type = other RNA
agggccagaatgatcctattcc

SEQ ID NO: 319 - RNA, 22 nt, synthetic construct
  misc_feature 1..22: note = Synthetic oligonucleotide
  source 1..22: mol_type = other RNA
gggccagaatgatcctattccc

SEQ ID NO: 320 - RNA, 22 nt, synthetic construct
  misc_feature 1..22: note = Synthetic oligonucleotide
  source 1..22: mol_type = other RNA
ggccagaatgatcctattcccg

SEQ ID NO: 321 - RNA, 22 nt, synthetic construct
  misc_feature 1..22: note = Synthetic oligonucleotide
  source 1..22: mol_type = other RNA
gccagaatgatcctattcccgg

SEQ ID NO: 322 - RNA, 22 nt, synthetic construct
  misc_feature 1..22: note = Synthetic oligonucleotide
  source 1..22: mol_type = other RNA
ccagaatgatcctattcccggc

SEQ ID NO: 323 - RNA, 22 nt, synthetic construct
  misc_feature 1..22: note = Synthetic oligonucleotide
  source 1..22: mol_type = other RNA
cagaatgatcctattcccggca

SEQ ID NO: 324 - RNA, 22 nt, synthetic construct
  misc_feature 1..22: note = Synthetic oligonucleotide
  source 1..22: mol_type = other RNA
agaatgatcctattcccggcac

SEQ ID NO: 325 - RNA, 22 nt, synthetic construct
  misc_feature 1..22: note = Synthetic oligonucleotide
  source 1..22: mol_type = other RNA
gaatgatcctattcccggcact

SEQ ID NO: 326 - RNA, 22 nt, synthetic construct
  misc_feature 1..22: note = Synthetic oligonucleotide
  source 1..22: mol_type = other RNA
aatgatcctattcccggcactt

SEQ ID NO: 327 - RNA, 22 nt, synthetic construct
  misc_feature 1..22: note = Synthetic oligonucleotide
  source 1..22: mol_type = other RNA
atgatcctattcccggcacttc

SEQ ID NO: 328 - RNA, 22 nt, synthetic construct
  misc_feature 1..22: note = Synthetic oligonucleotide
  source 1..22: mol_type = other RNA
tgatcctattcccggcacttct

SEQ ID NO: 329 - RNA, 22 nt, synthetic construct
  misc_feature 1..22: note = Synthetic oligonucleotide
  source 1..22: mol_type = other RNA
gatcctattcccggcacttctc

SEQ ID NO: 330 - RNA, 22 nt, synthetic construct
  misc_feature 1..22: note = Synthetic oligonucleotide
  source 1..22: mol_type = other RNA
atcctattcccggcacttctca

SEQ ID NO: 331 - RNA, 22 nt, synthetic construct
  misc_feature 1..22: note = Synthetic oligonucleotide
  source 1..22: mol_type = other RNA
tcctattcccggcacttctcag

SEQ ID NO: 332 - RNA, 22 nt, synthetic construct
  misc_feature 1..22: note = Synthetic oligonucleotide
  source 1..22: mol_type = other RNA
cctattcccggcacttctcagt

SEQ ID NO: 333 - RNA, 22 nt, synthetic construct
  misc_feature 1..22: note = Synthetic oligonucleotide
  source 1..22: mol_type = other RNA
ctattcccggcacttctcagtg

SEQ ID NO: 334 - RNA, 22 nt, synthetic construct
  misc_feature 1..22: note = Synthetic oligonucleotide
  source 1..22: mol_type = other RNA
tattcccggcacttctcagtga

SEQ ID NO: 335 - RNA, 22 nt, synthetic construct
  misc_feature 1..22: note = Synthetic oligonucleotide
  source 1..22: mol_type = other RNA
attcccggcacttctcagtgag

SEQ ID NO: 336 - RNA, 22 nt, synthetic construct
  misc_feature 1..22: note = Synthetic oligonucleotide
  source 1..22: mol_type = other RNA
ttcccggcacttctcagtgagg

SEQ ID NO: 337 - RNA, 22 nt, synthetic construct
  misc_feature 1..22: note = Synthetic oligonucleotide
  source 1..22: mol_type = other RNA
tcccggcacttctcagtgaggc

SEQ ID NO: 338 - RNA, 22 nt, synthetic construct
  misc_feature 1..22: note = Synthetic oligonucleotide
  source 1..22: mol_type = other RNA
cccggcacttctcagtgaggct

SEQ ID NO: 339 - RNA, 22 nt, synthetic construct
  misc_feature 1..22: note = Synthetic oligonucleotide
  source 1..22: mol_type = other RNA
ccggcacttctcagtgaggctc

SEQ ID NO: 340 - RNA, 22 nt, synthetic construct
  misc_feature 1..22: note = Synthetic oligonucleotide
  source 1..22: mol_type = other RNA
cggcacttctcagtgaggctct

SEQ ID NO: 341 - RNA, 22 nt, synthetic construct
  misc_feature 1..22: note = Synthetic oligonucleotide
  source 1..22: mol_type = other RNA
ggcacttctcagtgaggctctg

SEQ ID NO: 342 - RNA, 22 nt, synthetic construct
  misc_feature 1..22: note = Synthetic oligonucleotide
  source 1..22: mol_type = other RNA
gcacttctcagtgaggctctgt

SEQ ID NO: 343 - RNA, 22 nt, synthetic construct
  misc_feature 1..22: note = Synthetic oligonucleotide
  source 1..22: mol_type = other RNA
cacttctcagtgaggctctgtg

SEQ ID NO: 344 - RNA, 22 nt, synthetic construct
  misc_feature 1..22: note = Synthetic oligonucleotide
  source 1..22: mol_type = other RNA
acttctcagtgaggctctgtgg

SEQ ID NO: 345 - RNA, 22 nt, synthetic construct
  misc_feature 1..22: note = Synthetic oligonucleotide
  source 1..22: mol_type = other RNA
cttctcagtgaggctctgtggc

SEQ ID NO: 346 - RNA, 22 nt, synthetic construct
  misc_feature 1..22: note = Synthetic oligonucleotide
  source 1..22: mol_type = other RNA
ttctcagtgaggctctgtggct

SEQ ID NO: 347 - RNA, 22 nt, synthetic construct
  misc_feature 1..22: note = Synthetic oligonucleotide
  source 1..22: mol_type = other RNA
tctcagtgaggctctgtggctc

SEQ ID NO: 348 - RNA, 22 nt, synthetic construct
  misc_feature 1..22: note = Synthetic oligonucleotide
  source 1..22: mol_type = other RNA
ctcagtgaggctctgtggctca

SEQ ID NO: 349 - RNA, 22 nt, synthetic construct
  misc_feature 1..22: note = Synthetic oligonucleotide
  source 1..22: mol_type = other RNA
tcagtgaggctctgtggctcac

SEQ ID NO: 350 - RNA, 22 nt, synthetic construct
  misc_feature 1..22: note = Synthetic oligonucleotide
  source 1..22: mol_type = other RNA
cagtgaggctctgtggctcacc

SEQ ID NO: 351 - RNA, 22 nt, synthetic construct
  misc_feature 1..22: note = Synthetic oligonucleotide
  source 1..22: mol_type = other RNA
agtgaggctctgtggctcacct

SEQ ID NO: 352 - RNA, 22 nt, synthetic construct
  misc_feature 1..22: note = Synthetic oligonucleotide
  source 1..22: mol_type = other RNA
gtgaggctctgtggctcaccta

SEQ ID NO: 353 - RNA, 22 nt, synthetic construct
  misc_feature 1..22: note = Synthetic oligonucleotide
  source 1..22: mol_type = other RNA
tgaggctctgtggctcacctaa

SEQ ID NO: 354 - RNA, 22 nt, synthetic construct
  misc_feature 1..22: note = Synthetic oligonucleotide
  source 1..22: mol_type = other RNA
gaggctctgtggctcacctaag

SEQ ID NO: 355 - RNA, 22 nt, synthetic construct
  misc_feature 1..22: note = Synthetic oligonucleotide
  source 1..22: mol_type = other RNA
aggctctgtggctcacctaaga

SEQ ID NO: 356 - RNA, 22 nt, synthetic construct
  misc_feature 1..22: note = Synthetic oligonucleotide
  source 1..22: mol_type = other RNA
ggctctgtggctcacctaagaa

SEQ ID NO: 357 - RNA, 22 nt, synthetic construct
  misc_feature 1..22: note = Synthetic oligonucleotide
  source 1..22: mol_type = other RNA
gctctgtggctcacctaagaaa

SEQ ID NO: 358 - RNA, 22 nt, synthetic construct
  misc_feature 1..22: note = Synthetic oligonucleotide
  source 1..22: mol_type = other RNA
ctctgtggctcacctaagaaac

SEQ ID NO: 359 - RNA, 22 nt, synthetic construct
  misc_feature 1..22: note = Synthetic oligonucleotide
  source 1..22: mol_type = other RNA
tctgtggctcacctaagaaacc

SEQ ID NO: 360 - RNA, 22 nt, synthetic construct
  misc_feature 1..22: note = Synthetic oligonucleotide
  source 1..22: mol_type = other RNA
ctgtggctcacctaagaaacca

SEQ ID NO: 361 - RNA, 22 nt, synthetic construct
  misc_feature 1..22: note = Synthetic oligonucleotide
  source 1..22: mol_type = other RNA
tgtggctcacctaagaaaccag

SEQ ID NO: 362 - RNA, 22 nt, synthetic construct
  misc_feature 1..22: note = Synthetic oligonucleotide
  source 1..22: mol_type = other RNA
gtggctcacctaagaaaccagc

SEQ ID NO: 363 - RNA, 22 nt, synthetic construct
  misc_feature 1..22: note = Synthetic oligonucleotide
  source 1..22: mol_type = other RNA
tggctcacctaagaaaccagcc

SEQ ID NO: 364 - RNA, 22 nt, synthetic construct
  misc_feature 1..22: note = Synthetic oligonucleotide
  source 1..22: mol_type = other RNA
ggctcacctaagaaaccagcct

SEQ ID NO: 365 - RNA, 22 nt, synthetic construct
  misc_feature 1..22: note = Synthetic oligonucleotide
  source 1..22: mol_type = other RNA
gctcacctaagaaaccagcctc

SEQ ID NO: 366 - RNA, 22 nt, synthetic construct
  misc_feature 1..22: note = Synthetic oligonucleotide
  source 1..22: mol_type = other RNA
ctcacctaagaaaccagcctcc

SEQ ID NO: 367 - RNA, 22 nt, synthetic construct
  misc_feature 1..22: note = Synthetic oligonucleotide
  source 1..22: mol_type = other RNA
tcacctaagaaaccagcctccc

SEQ ID NO: 368 - RNA, 22 nt, synthetic construct
  misc_feature 1..22: note = Synthetic oligonucleotide
  source 1..22: mol_type = other RNA
cacctaagaaaccagcctccct

SEQ ID NO: 369 - RNA, 22 nt, synthetic construct
  misc_feature 1..22: note = Synthetic oligonucleotide
  source 1..22: mol_type = other RNA
acctaagaaaccagcctccctt

SEQ ID NO: 370 - RNA, 22 nt, synthetic construct
  misc_feature 1..22: note = Synthetic oligonucleotide
  source 1..22: mol_type = other RNA
cctaagaaaccagcctcccttg

SEQ ID NO: 371 - RNA, 22 nt, synthetic construct
  misc_feature 1..22: note = Synthetic oligonucleotide
  source 1..22: mol_type = other RNA
ctaagaaaccagcctcccttgc

SEQ ID NO: 372 - RNA, 22 nt, synthetic construct
  misc_feature 1..22: note = Synthetic oligonucleotide
  source 1..22: mol_type = other RNA
taagaaaccagcctcccttgca

SEQ ID NO: 373 - RNA, 22 nt, synthetic construct
  misc_feature 1..22: note = Synthetic oligonucleotide
  source 1..22: mol_type = other RNA
aagaaaccagcctcccttgcag

SEQ ID NO: 374 - RNA, 22 nt, synthetic construct
  misc_feature 1..22: note = Synthetic oligonucleotide
  source 1..22: mol_type = other RNA
agaaaccagcctcccttgcagg

SEQ ID NO: 375 - RNA, 22 nt, synthetic construct
  misc_feature 1..22: note = Synthetic oligonucleotide
  source 1..22: mol_type = other RNA
gaaaccagcctcccttgcaggc

SEQ ID NO: 376 - RNA, 22 nt, synthetic construct
  misc_feature 1..22: note = Synthetic oligonucleotide
  source 1..22: mol_type = other RNA
aaaccagcctcccttgcaggca

SEQ ID NO: 377 - RNA, 22 nt, synthetic construct
  misc_feature 1..22: note = Synthetic oligonucleotide
  source 1..22: mol_type = other RNA
aaccagcctcccttgcaggcaa

SEQ ID NO: 378 - RNA, 22 nt, synthetic construct
  misc_feature 1..22: note = Synthetic oligonucleotide
  source 1..22: mol_type = other RNA
accagcctcccttgcaggcaac

SEQ ID NO: 379 - RNA, 22 nt, synthetic construct
  misc_feature 1..22: note = Synthetic oligonucleotide
  source 1..22: mol_type = other RNA
ccagcctcccttgcaggcaacg

SEQ ID NO: 380 - RNA, 22 nt, synthetic construct
  misc_feature 1..22: note = Synthetic oligonucleotide
  source 1..22: mol_type = other RNA
cagcctcccttgcaggcaacgg

SEQ ID NO: 381 - RNA, 22 nt, synthetic construct
  misc_feature 1..22: note = Synthetic oligonucleotide
  source 1..22: mol_type = other RNA
agcctcccttgcaggcaacggc

SEQ ID NO: 382 - RNA, 22 nt, synthetic construct
  misc_feature 1..22: note = Synthetic oligonucleotide
  source 1..22: mol_type = other RNA
cctcccttgcaggcaacggcct

SEQ ID NO: 383 - RNA, 22 nt, synthetic construct
  misc_feature 1..22: note = Synthetic oligonucleotide
  source 1..22: mol_type = other RNA
ctcccttgcaggcaacggccta

SEQ ID NO: 384 - RNA, 22 nt, synthetic construct
  misc_feature 1..22: note = Synthetic oligonucleotide
  source 1..22: mol_type = other RNA
tcccttgcaggcaacggcctag

SEQ ID NO: 385 - RNA, 22 nt, synthetic construct
  misc_feature 1..22: note = Synthetic oligonucleotide
  source 1..22: mol_type = other RNA
cccttgcaggcaacggcctagc

SEQ ID NO: 386 - RNA, 22 nt, synthetic construct
  misc_feature 1..22: note = Synthetic oligonucleotide
  source 1..22: mol_type = other RNA
ccttgcaggcaacggcctagct

SEQ ID NO: 387 - RNA, 22 nt, synthetic construct
  misc_feature 1..22: note = Synthetic oligonucleotide
  source 1..22: mol_type = other RNA
cttgcaggcaacggcctagctg

SEQ ID NO: 388 - RNA, 22 nt, synthetic construct
  misc_feature 1..22: note = Synthetic oligonucleotide
  source 1..22: mol_type = other RNA
ttgcaggcaacggcctagctgg

SEQ ID NO: 389 - RNA, 22 nt, synthetic construct
  misc_feature 1..22: note = Synthetic oligonucleotide
  source 1..22: mol_type = other RNA
tgcaggcaacggcctagctggc

SEQ ID NO: 390 - RNA, 22 nt, synthetic construct
  misc_feature 1..22: note = Synthetic oligonucleotide
  source 1..22: mol_type = other RNA
caggcaacggcctagctggcct

SEQ ID NO: 391 - RNA, 22 nt, synthetic construct
  misc_feature 1..22: note = Synthetic oligonucleotide
  source 1..22: mol_type = other RNA
aggcaacggcctagctggcctg

SEQ ID NO: 392 - RNA, 22 nt, synthetic construct
  misc_feature 1..22: note = Synthetic oligonucleotide
  source 1..22: mol_type = other RNA
gcaacggcctagctggcctggt

SEQ ID NO: 393 - RNA, 22 nt, synthetic construct
  misc_feature 1..22: note = Synthetic oligonucleotide
  source 1..22: mol_type = other RNA
caacggcctagctggcctggtc

SEQ ID NO: 394 - RNA, 22 nt, synthetic construct
  misc_feature 1..22: note = Synthetic oligonucleotide
  source 1..22: mol_type = other RNA
aacggcctagctggcctggtct

SEQ ID NO: 395 - RNA, 22 nt, synthetic construct
  misc_feature 1..22: note = Synthetic oligonucleotide
  source 1..22: mol_type = other RNA
acggcctagctggcctggtctg

SEQ ID NO: 396 - RNA, 22 nt, synthetic construct
  misc_feature 1..22: note = Synthetic oligonucleotide
  source 1..22: mol_type = other RNA
ggcctagctggcctggtctgga

SEQ ID NO: 397 - RNA, 22 nt, synthetic construct
  misc_feature 1..22: note = Synthetic oligonucleotide
  source 1..22: mol_type = other RNA
gcctagctggcctggtctggag

SEQ ID NO: 398 - RNA, 22 nt, synthetic construct
  misc_feature 1..22: note = Synthetic oligonucleotide
  source 1..22: mol_type = other RNA
cctagctggcctggtctggagg

SEQ ID NO: 399 - RNA, 22 nt, synthetic construct
  misc_feature 1..22: note = Synthetic oligonucleotide
  source 1..22: mol_type = other RNA
ctagctggcctggtctggaggc

SEQ ID NO: 400 - RNA, 22 nt, synthetic construct
  misc_feature 1..22: note = Synthetic oligonucleotide
  source 1..22: mol_type = other RNA
tagctggcctggtctggaggct

SEQ ID NO: 401 - RNA, 22 nt, synthetic construct
  misc_feature 1..22: note = Synthetic oligonucleotide
  source 1..22: mol_type = other RNA
agctggcctggtctggaggctc

SEQ ID NO: 402 - RNA, 22 nt, synthetic construct
  misc_feature 1..22: note = Synthetic oligonucleotide
  source 1..22: mol_type = other RNA
gctggcctggtctggaggctct

SEQ ID NO: 403 - RNA, 22 nt, synthetic construct
  misc_feature 1..22: note = Synthetic oligonucleotide
  source 1..22: mol_type = other RNA
ctggcctggtctggaggctctc

SEQ ID NO: 404 - RNA, 22 nt, synthetic construct
  misc_feature 1..22: note = Synthetic oligonucleotide
  source 1..22: mol_type = other RNA
tttacatccacacccaagatac

SEQ ID NO: 405 - RNA, 22 nt, synthetic construct
  misc_feature 1..22: note = Synthetic oligonucleotide
  source 1..22: mol_type = other RNA
tcttgagatttgactcgcatga

SEQ ID NO: 406 - RNA, 22 nt, synthetic construct
  misc_feature 1..22: note = Synthetic oligonucleotide
  source 1..22: mol_type = other RNA
cttgagatttgactcgcatgat

SEQ ID NO: 407 - RNA, 22 nt, synthetic construct
  misc_feature 1..22: note = Synthetic oligonucleotide
  source 1..22: mol_type = other RNA
tgagatttgactcgcatgattg

SEQ ID NO: 408 - RNA, 22 nt, synthetic construct
  misc_feature 1..22: note = Synthetic oligonucleotide
  source 1..22: mol_type = other RNA
gagatttgactcgcatgattgc

SEQ ID NO: 409 - RNA, 22 nt, synthetic construct
  misc_feature 1..22: note = Synthetic oligonucleotide
  source 1..22: mol_type = other RNA
agatttgactcgcatgattgct

SEQ ID NO: 410 - RNA, 22 nt, synthetic construct
  misc_feature 1..22: note = Synthetic oligonucleotide
  source 1..22: mol_type = other RNA
gatttgactcgcatgattgcta

SEQ ID NO: 411 - RNA, 22 nt, synthetic construct
  misc_feature 1..22: note = Synthetic oligonucleotide
  source 1..22: mol_type = other RNA
tttgactcgcatgattgctatg

SEQ ID NO: 412 - RNA, 22 nt, synthetic construct
  misc_feature 1..22: note = Synthetic oligonucleotide
  source 1..22: mol_type = other RNA
ttgactcgcatgattgctatgg

SEQ ID NO: 413 - RNA, 22 nt, synthetic construct
  misc_feature 1..22: note = Synthetic oligonucleotide
  source 1..22: mol_type = other RNA
tgactcgcatgattgctatggg

SEQ ID NO: 414 - RNA, 22 nt, synthetic construct
  misc_feature 1..22: note = Synthetic oligonucleotide
  source 1..22: mol_type = other RNA
gactcgcatgattgctatggga

SEQ ID NO: 415 - RNA, 22 nt, synthetic construct
  misc_feature 1..22: note = Synthetic oligonucleotide
  source 1..22: mol_type = other RNA
actcgcatgattgctatgggac

SEQ ID NO: 416 - RNA, 22 nt, synthetic construct
  misc_feature 1..22: note = Synthetic oligonucleotide
  source 1..22: mol_type = other RNA
ctcgcatgattgctatgggaca

SEQ ID NO: 417 - RNA, 22 nt, synthetic construct
  misc_feature 1..22: note = Synthetic oligonucleotide
  source 1..22: mol_type = other RNA
tcgcatgattgctatgggacaa

SEQ ID NO: 418 - RNA, 22 nt, synthetic construct
  misc_feature 1..22: note = Synthetic oligonucleotide
  source 1..22: mol_type = other RNA
cgcatgattgctatgggacaag

SEQ ID NO: 419 - RNA, 22 nt, synthetic construct
  misc_feature 1..22: note = Synthetic oligonucleotide
  source 1..22: mol_type = other RNA
gcatgattgctatgggacaagt

SEQ ID NO: 420 - RNA, 22 nt, synthetic construct
  misc_feature 1..22: note = Synthetic oligonucleotide
  source 1..22: mol_type = other RNA
catgattgctatgggacaagtt

SEQ ID NO: 421 - RNA, 22 nt, synthetic construct
  misc_feature 1..22: note = Synthetic oligonucleotide
  source 1..22: mol_type = other RNA
gattgctatgggacaagttttc

SEQ ID NO: 422 - RNA, 22 nt, synthetic construct
  misc_feature 1..22: note = Synthetic oligonucleotide
  source 1..22: mol_type = other RNA
tgctatgggacaagttttcatc

SEQ ID NO: 423 - RNA, 22 nt, synthetic construct
  misc_feature 1..22: note = Synthetic oligonucleotide
  source 1..22: mol_type = other RNA
gctatgggacaagttttcatct

SEQ ID NO: 424 - RNA, 22 nt, synthetic construct
  misc_feature 1..22: note = Synthetic oligonucleotide
  source 1..22: mol_type = other RNA
ctatgggacaagttttcatctg

SEQ ID NO: 425 - RNA, 22 nt, synthetic construct
  misc_feature 1..22: note = Synthetic oligonucleotide
  source 1..22: mol_type = other RNA
tatgggacaagttttcatctgc

SEQ ID NO: 426 - RNA, 22 nt, synthetic construct
  misc_feature 1..22: note = Synthetic oligonucleotide
  source 1..22: mol_type = other RNA
atgggacaagttttcatctgca

SEQ ID NO: 427 - RNA, 22 nt, synthetic construct
  misc_feature 1..22: note = Synthetic oligonucleotide
  source 1..22: mol_type = other RNA
tgggacaagttttcatctgcag

SEQ ID NO: 428 - RNA, 22 nt, synthetic construct
  misc_feature 1..22: note = Synthetic oligonucleotide
  source 1..22: mol_type = other RNA
gggacaagttttcatctgcagt

SEQ ID NO: 429 - RNA, 22 nt, synthetic construct
  misc_feature 1..22: note = Synthetic oligonucleotide
  source 1..22: mol_type = other RNA
ggacaagttttcatctgcagtt

SEQ ID NO: 430 - RNA, 22 nt, synthetic construct
  misc_feature 1..22: note = Synthetic oligonucleotide
  source 1..22: mol_type = other RNA
ctgcagtttaaatctgtttccc

SEQ ID NO: 431 - RNA, 22 nt, synthetic construct
  misc_feature 1..22: note = Synthetic oligonucleotide
  source 1..22: mol_type = other RNA
taggggtttggaattctagatc

SEQ ID NO: 432 - RNA, 22 nt, synthetic construct
  misc_feature 1..22: note = Synthetic oligonucleotide
  source 1..22: mol_type = other RNA
aggggtttggaattctagatcg

SEQ ID NO: 433 - RNA, 22 nt, synthetic construct
  misc_feature 1..22: note = Synthetic oligonucleotide
  source 1..22: mol_type = other RNA
ggggtttggaattctagatcgt

SEQ ID NO: 434 - RNA, 22 nt, synthetic construct
  misc_feature 1..22: note = Synthetic oligonucleotide
  source 1..22: mol_type = other RNA
gggtttggaattctagatcgta

SEQ ID NO: 435 - RNA, 22 nt, synthetic construct
  misc_feature 1..22: note = Synthetic oligonucleotide
  source 1..22: mol_type = other RNA
gatcgtatttgaagtgttggtg

SEQ ID NO: 436 - RNA, 22 nt, synthetic construct
  misc_feature 1..22: note = Synthetic oligonucleotide
  source 1..22: mol_type = other RNA
atcgtatttgaagtgttggtgc

SEQ ID NO: 437 - RNA, 22 nt, synthetic construct
  misc_feature 1..22: note = Synthetic oligonucleotide
  source 1..22: mol_type = other RNA
tcgtatttgaagtgttggtgcc

SEQ ID NO: 438 - RNA, 22 nt, synthetic construct
  misc_feature 1..22: note = Synthetic oligonucleotide
  source 1..22: mol_type = other RNA
cgtatttgaagtgttggtgcca

SEQ ID NO: 439 - RNA, 22 nt, synthetic construct
  misc_feature 1..22: note = Synthetic oligonucleotide
  source 1..22: mol_type = other RNA
gtatttgaagtgttggtgccac

SEQ ID NO: 440 - RNA, 22 nt, synthetic construct
  misc_feature 1..22: note = Synthetic oligonucleotide
  source 1..22: mol_type = other RNA
tatttgaagtgttggtgccaca

SEQ ID NO: 441 - RNA, 22 nt, synthetic construct
  misc_feature 1..22: note = Synthetic oligonucleotide
  source 1..22: mol_type = other RNA
atttgaagtgttggtgccacac

SEQ ID NO: 442 - RNA, 22 nt, synthetic construct
  misc_feature 1..22: note = Synthetic oligonucleotide
  source 1..22: mol_type = other RNA
cacaccttaacacctgcacgct

SEQ ID NO: 443 - RNA, 22 nt, synthetic construct
  misc_feature 1..22: note = Synthetic oligonucleotide
  source 1..22: mol_type = other RNA
acaccttaacacctgcacgctg

SEQ ID NO: 444 - RNA, 22 nt, synthetic construct
  misc_feature 1..22: note = Synthetic oligonucleotide
  source 1..22: mol_type = other RNA
caccttaacacctgcacgctgg

SEQ ID NO: 445 - RNA, 22 nt, synthetic construct
  misc_feature 1..22: note = Synthetic oligonucleotide
  source 1..22: mol_type = other RNA
accttaacacctgcacgctggc

SEQ ID NO: 446 - RNA, 22 nt, synthetic construct
  misc_feature 1..22: note = Synthetic oligonucleotide
  source 1..22: mol_type = other RNA
ccttaacacctgcacgctggca

SEQ ID NO: 447 - RNA, 22 nt, synthetic construct
  misc_feature 1..22: note = Synthetic oligonucleotide
  source 1..22: mol_type = other RNA
cttaacacctgcacgctggcaa

SEQ ID NO: 448 - RNA, 22 nt, synthetic construct
  misc_feature 1..22: note = Synthetic oligonucleotide
  source 1..22: mol_type = other RNA
ttaacacctgcacgctggcaac

SEQ ID NO: 449 - RNA, 22 nt, synthetic construct
  misc_feature 1..22: note = Synthetic oligonucleotide
  source 1..22: mol_type = other RNA
taacacctgcacgctggcaaca

SEQ ID NO: 450 - RNA, 22 nt, synthetic construct
  misc_feature 1..22: note = Synthetic oligonucleotide
  source 1..22: mol_type = other RNA
aacacctgcacgctggcaacaa

SEQ ID NO: 451 - RNA, 22 nt, synthetic construct
  misc_feature 1..22: note = Synthetic oligonucleotide
  source 1..22: mol_type = other RNA
acacctgcacgctggcaacaaa

SEQ ID NO: 452 - RNA, 22 nt, synthetic construct
  misc_feature 1..22: note = Synthetic oligonucleotide
  source 1..22: mol_type = other RNA
cacctgcacgctggcaacaaaa

SEQ ID NO: 453 - RNA, 22 nt, synthetic construct
  misc_feature 1..22: note = Synthetic oligonucleotide
  source 1..22: mol_type = other RNA
acctgcacgctggcaacaaaac

SEQ ID NO: 454 - RNA, 22 nt, synthetic construct
  misc_feature 1..22: note = Synthetic oligonucleotide
  source 1..22: mol_type = other RNA
cctgcacgctggcaacaaaacc

SEQ ID NO: 455 - RNA, 22 nt, synthetic construct
  misc_feature 1..22: note = Synthetic oligonucleotide
  source 1..22: mol_type = other RNA
ctgcacgctggcaacaaaaccg

SEQ ID NO: 456 - RNA, 22 nt, synthetic construct
  misc_feature 1..22: note = Synthetic oligonucleotide
  source 1..22: mol_type = other RNA
tgcacgctggcaacaaaaccgt

SEQ ID NO: 457 - RNA, 22 nt, synthetic construct
  misc_feature 1..22: note = Synthetic oligonucleotide
  source 1..22: mol_type = other RNA
gcacgctggcaacaaaaccgtc

SEQ ID NO: 458 - RNA, 22 nt, synthetic construct
  misc_feature 1..22: note = Synthetic oligonucleotide
  source 1..22: mol_type = other RNA
cacgctggcaacaaaaccgtcc

SEQ ID NO: 459 - RNA, 22 nt, synthetic construct
  misc_feature 1..22: note = Synthetic oligonucleotide
  source 1..22: mol_type = other RNA
acgctggcaacaaaaccgtccg

SEQ ID NO: 460 - RNA, 22 nt, synthetic construct
  misc_feature 1..22: note = Synthetic oligonucleotide
  source 1..22: mol_type = other RNA
cgctggcaacaaaaccgtccgc

SEQ ID NO: 461 - RNA, 22 nt, synthetic construct
  misc_feature 1..22: note = Synthetic oligonucleotide
  source 1..22: mol_type = other RNA
gctggcaacaaaaccgtccgct

SEQ ID NO: 462 - RNA, 22 nt, synthetic construct
  misc_feature 1..22: note = Synthetic oligonucleotide
  source 1..22: mol_type = other RNA
ctggcaacaaaaccgtccgctc

SEQ ID NO: 463 - RNA, 22 nt, synthetic construct
  misc_feature 1..22: note = Synthetic oligonucleotide
  source 1..22: mol_type = other RNA
tggcaacaaaaccgtccgctct

SEQ ID NO: 464 - RNA, 22 nt, synthetic construct
  misc_feature 1..22: note = Synthetic oligonucleotide
  source 1..22: mol_type = other RNA
ggcaacaaaaccgtccgctctg

SEQ ID NO: 465 - RNA, 22 nt, synthetic construct
  misc_feature 1..22: note = Synthetic oligonucleotide
  source 1..22: mol_type = other RNA
gcaacaaaaccgtccgctctgc

SEQ ID NO: 466 - RNA, 22 nt, synthetic construct
  misc_feature 1..22: note = Synthetic oligonucleotide
  source 1..22: mol_type = other RNA
caacaaaaccgtccgctctgca

SEQ ID NO: 467 - RNA, 22 nt, synthetic construct
  misc_feature 1..22: note = Synthetic oligonucleotide
  source 1..22: mol_type = other RNA
aacaaaaccgtccgctctgcag

SEQ ID NO: 468 - RNA, 22 nt, synthetic construct
  misc_feature 1..22: note = Synthetic oligonucleotide
  source 1..22: mol_type = other RNA
acaaaaccgtccgctctgcagc

SEQ ID NO: 469 - RNA, 22 nt, synthetic construct
  misc_feature 1..22: note = Synthetic oligonucleotide
  source 1..22: mol_type = other RNA
caaaaccgtccgctctgcagca

SEQ ID NO: 470 - RNA, 22 nt, synthetic construct
  misc_feature 1..22: note = Synthetic oligonucleotide
  source 1..22: mol_type = other RNA
aaaaccgtccgctctgcagcac

SEQ ID NO: 471 - RNA, 22 nt, synthetic construct
  misc_feature 1..22: note = Synthetic oligonucleotide
  source 1..22: mol_type = other RNA
aaaccgtccgctctgcagcaca

SEQ ID NO: 472 - RNA, 22 nt, synthetic construct
  misc_feature 1..22: note = Synthetic oligonucleotide
  source 1..22: mol_type = other RNA
aaccgtccgctctgcagcacag

SEQ ID NO: 473 - RNA, 22 nt, synthetic construct
  misc_feature 1..22: note = Synthetic oligonucleotide
  source 1..22: mol_type = other RNA
accgtccgctctgcagcacagc

SEQ ID NO: 474 - RNA, 22 nt, synthetic construct
  misc_feature 1..22: note = Synthetic oligonucleotide
  source 1..22: mol_type = other RNA
ccgtccgctctgcagcacagct

SEQ ID NO: 475 - RNA, 22 nt, synthetic construct
  misc_feature 1..22: note = Synthetic oligonucleotide
  source 1..22: mol_type = other RNA
cgtccgctctgcagcacagctg

SEQ ID NO: 476 - RNA, 22 nt, synthetic construct
  misc_feature 1..22: note = Synthetic oligonucleotide
  source 1..22: mol_type = other RNA
gtccgctctgcagcacagctgg

SEQ ID NO: 477 - RNA, 22 nt, synthetic construct
  misc_feature 1..22: note = Synthetic oligonucleotide
  source 1..22: mol_type = other RNA
tccgctctgcagcacagctggg

SEQ ID NO: 478 - RNA, 22 nt, synthetic construct
  misc_feature 1..22: note = Synthetic oligonucleotide
  source 1..22: mol_type = other RNA
cgctctgcagcacagctggggt

SEQ ID NO: 479 - RNA, 22 nt, synthetic construct
  misc_feature 1..22: note = Synthetic oligonucleotide
  source 1..22: mol_type = other RNA
gctctgcagcacagctggggtc

SEQ ID NO: 480 - RNA, 22 nt, synthetic construct
  misc_feature 1..22: note = Synthetic oligonucleotide
  source 1..22: mol_type = other RNA
ctctgcagcacagctggggtca

SEQ ID NO: 481 - RNA, 22 nt, synthetic construct
  misc_feature 1..22: note = Synthetic oligonucleotide
  source 1..22: mol_type = other RNA
tctgcagcacagctggggtcac

SEQ ID NO: 482 - RNA, 22 nt, synthetic construct
  misc_feature 1..22: note = Synthetic oligonucleotide
  source 1..22: mol_type = other RNA
ctgcagcacagctggggtcacc

SEQ ID NO: 483 - RNA, 22 nt, synthetic construct
  misc_feature 1..22: note = Synthetic oligonucleotide
  source 1..22: mol_type = other RNA
tgcagcacagctggggtcacct

SEQ ID NO: 484 - RNA, 22 nt, synthetic construct
  misc_feature 1..22: note = Synthetic oligonucleotide
  source 1..22: mol_type = other RNA
gcagcacagctggggtcacctg

SEQ ID NO: 485 - RNA, 22 nt, synthetic construct
  misc_feature 1..22: note = Synthetic oligonucleotide
  source 1..22: mol_type = other RNA
cagcacagctggggtcacctga

SEQ ID NO: 486 - RNA, 22 nt, synthetic construct
  misc_feature 1..22: note = Synthetic oligonucleotide
  source 1..22: mol_type = other RNA
agcacagctggggtcacctgac

SEQ ID NO: 487 - RNA, 22 nt, synthetic construct
  misc_feature 1..22: note = Synthetic oligonucleotide
  source 1..22: mol_type = other RNA
gcacagctggggtcacctgacc

SEQ ID NO: 488 - RNA, 22 nt, synthetic construct
  misc_feature 1..22: note = Synthetic oligonucleotide
  source 1..22: mol_type = other RNA
cacagctggggtcacctgacct

SEQ ID NO: 489 - RNA, 22 nt, synthetic construct
  misc_feature 1..22: note = Synthetic oligonucleotide
  source 1..22: mol_type = other RNA
acagctggggtcacctgacctt

SEQ ID NO: 490 - RNA, 22 nt, synthetic construct
  misc_feature 1..22: note = Synthetic oligonucleotide
  source 1..22: mol_type = other RNA
cagctggggtcacctgaccttt

SEQ ID NO: 491 - RNA, 22 nt, synthetic construct
  misc_feature 1..22: note = Synthetic oligonucleotide
  source 1..22: mol_type = other RNA
agctggggtcacctgacctttc

SEQ ID NO: 492 - RNA, 22 nt, synthetic construct
  misc_feature 1..22: note = Synthetic oligonucleotide
  source 1..22: mol_type = other RNA
gctggggtcacctgacctttct

SEQ ID NO: 493 - RNA, 22 nt, synthetic construct
  misc_feature 1..22: note = Synthetic oligonucleotide
  source 1..22: mol_type = other RNA
ctggggtcacctgacctttctc

SEQ ID NO: 494 - RNA, 22 nt, synthetic construct
  misc_feature 1..22: note = Synthetic oligonucleotide
  source 1..22: mol_type = other RNA
tggggtcacctgacctttctcc

SEQ ID NO: 495 - RNA, 22 nt, synthetic construct
  misc_feature 1..22: note = Synthetic oligonucleotide
  source 1..22: mol_type = other RNA
ggggtcacctgacctttctcct

SEQ ID NO: 496 - RNA, 22 nt, synthetic construct
  misc_feature 1..22: note = Synthetic oligonucleotide
  source 1..22: mol_type = other RNA
gggtcacctgacctttctcctg

SEQ ID NO: 497 - RNA, 22 nt, synthetic construct
  misc_feature 1..22: note = Synthetic oligonucleotide
  source 1..22: mol_type = other RNA
ggtcacctgacctttctcctgt

SEQ ID NO: 498 - RNA, 22 nt, synthetic construct
  misc_feature 1..22: note = Synthetic oligonucleotide
  source 1..22: mol_type = other RNA
gtcacctgacctttctcctgtc

SEQ ID NO: 499 - RNA, 22 nt, synthetic construct
  misc_feature 1..22: note = Synthetic oligonucleotide
  source 1..22: mol_type = other RNA
tcacctgacctttctcctgtcc

SEQ ID NO: 500 - RNA, 22 nt, synthetic construct
  misc_feature 1..22: note = Synthetic oligonucleotide
  source 1..22: mol_type = other RNA
cacctgacctttctcctgtccc

SEQ ID NO: 501 - RNA, 22 nt, synthetic construct
  misc_feature 1..22: note = Synthetic oligonucleotide
  source 1..22: mol_type = other RNA
ccccacttgagctcagtggctg

SEQ ID NO: 502 - RNA, 22 nt, synthetic construct
  misc_feature 1..22: note = Synthetic oligonucleotide
  source 1..22: mol_type = other RNA
cccacttgagctcagtggctgg

SEQ ID NO: 503 - RNA, 22 nt, synthetic construct
  misc_feature 1..22: note = Synthetic oligonucleotide
  source 1..22: mol_type = other RNA
ccacttgagctcagtggctggg

SEQ ID NO: 504 - RNA, 22 nt, synthetic construct
  misc_feature 1..22: note = Synthetic oligonucleotide
  source 1..22: mol_type = other RNA
cacttgagctcagtggctgggc

SEQ ID NO: 505 - RNA, 22 nt, synthetic construct
  misc_feature 1..22: note = Synthetic oligonucleotide
  source 1..22: mol_type = other RNA
acttgagctcagtggctgggca

SEQ ID NO: 506 - RNA, 22 nt, synthetic construct
  misc_feature 1..22: note = Synthetic oligonucleotide
  source 1..22: mol_type = other RNA
cttgagctcagtggctgggcag

SEQ ID NO: 507 - RNA, 22 nt, synthetic construct
  misc_feature 1..22: note = Synthetic oligonucleotide
  source 1..22: mol_type = other RNA
ttgagctcagtggctgggcagc

SEQ ID NO: 508 - RNA, 22 nt, synthetic construct
  misc_feature 1..22: note = Synthetic oligonucleotide
  source 1..22: mol_type = other RNA
tgagctcagtggctgggcagca

SEQ ID NO: 509 - RNA, 22 nt, synthetic construct
  misc_feature 1..22: note = Synthetic oligonucleotide
  source 1..22: mol_type = other RNA
gagctcagtggctgggcagcag

SEQ ID NO: 510 - RNA, 22 nt, synthetic construct
  misc_feature 1..22: note = Synthetic oligonucleotide
  source 1..22: mol_type = other RNA
agctcagtggctgggcagcagg

SEQ ID NO: 511 - RNA, 22 nt, synthetic construct
  misc_feature 1..22: note = Synthetic oligonucleotide
  source 1..22: mol_type = other RNA
tcagtggctgggcagcagggga

SEQ ID NO: 512 - RNA, 22 nt, synthetic construct
  misc_feature 1..22: note = Synthetic oligonucleotide
  source 1..22: mol_type = other RNA
cagtggctgggcagcaggggat

SEQ ID NO: 513 - RNA, 22 nt, synthetic construct
  misc_feature 1..22: note = Synthetic oligonucleotide
  source 1..22: mol_type = other RNA
agtggctgggcagcaggggatg

SEQ ID NO: 514 - RNA, 22 nt, synthetic construct
  misc_feature 1..22: note = Synthetic oligonucleotide
  source 1..22: mol_type = other RNA
tggctgggcagcaggggatgca

SEQ ID NO: 515 - RNA, 22 nt, synthetic construct
  misc_feature 1..22: note = Synthetic oligonucleotide
  source 1..22: mol_type = other RNA
ggctgggcagcaggggatgcat

SEQ ID NO: 516 - RNA, 22 nt, synthetic construct
  misc_feature 1..22: note = Synthetic oligonucleotide
  source 1..22: mol_type = other RNA
gctgggcagcaggggatgcatg

SEQ ID NO: 517 - RNA, 22 nt, synthetic construct
  misc_feature 1..22: note = Synthetic oligonucleotide
  source 1..22: mol_type = other RNA
ctgggcagcaggggatgcatgg

SEQ ID NO: 518 - RNA, 22 nt, synthetic construct
  misc_feature 1..22: note = Synthetic oligonucleotide
  source 1..22: mol_type = other RNA
tgggcagcaggggatgcatggc

SEQ ID NO: 519 - RNA, 22 nt, synthetic construct
  misc_feature 1..22: note = Synthetic oligonucleotide
  source 1..22: mol_type = other RNA
ggcagcaggggatgcatggcca

SEQ ID NO: 520 - RNA, 22 nt, synthetic construct
  misc_feature 1..22: note = Synthetic oligonucleotide
  source 1..22: mol_type = other RNA
gcagcaggggatgcatggccac

SEQ ID NO: 521 - RNA, 22 nt, synthetic construct
  misc_feature 1..22: note = Synthetic oligonucleotide
  source 1..22: mol_type = other RNA
cagcaggggatgcatggccact

SEQ ID NO: 522 - RNA, 22 nt, synthetic construct
  misc_feature 1..22: note = Synthetic oligonucleotide
  source 1..22: mol_type = other RNA
agcaggggatgcatggccactg

SEQ ID NO: 523 - RNA, 22 nt, synthetic construct
  misc_feature 1..22: note = Synthetic oligonucleotide
  source 1..22: mol_type = other RNA
gcaggggatgcatggccactgg

SEQ ID NO: 524 - RNA, 22 nt, synthetic construct
  misc_feature 1..22: note = Synthetic oligonucleotide
  source 1..22: mol_type = other RNA
caggggatgcatggccactggc

SEQ ID NO: 525 - RNA, 22 nt, synthetic construct
  misc_feature 1..22: note = Synthetic oligonucleotide
  source 1..22: mol_type = other RNA
aggggatgcatggccactggcc

SEQ ID NO: 526 - RNA, 22 nt, synthetic construct
  misc_feature 1..22: note = Synthetic oligonucleotide
  source 1..22: mol_type = other RNA
atgcatggccactggccggcca

SEQ ID NO: 527 - RNA, 22 nt, synthetic construct
  misc_feature 1..22: note = Synthetic oligonucleotide
  source 1..22: mol_type = other RNA
cggccaggtgcagctctcagct

SEQ ID NO: 528 - RNA, 22 nt, synthetic construct
  misc_feature 1..22: note = Synthetic oligonucleotide
  source 1..22: mol_type = other RNA
ggccaggtgcagctctcagctg

SEQ ID NO: 529 - RNA, 22 nt, synthetic construct
  misc_feature 1..22: note = Synthetic oligonucleotide
  source 1..22: mol_type = other RNA
gccaggtgcagctctcagctgg

SEQ ID NO: 530 - RNA, 22 nt, synthetic construct
  misc_feature 1..22: note = Synthetic oligonucleotide
  source 1..22: mol_type = other RNA
ccaggtgcagctctcagctggg

SEQ ID NO: 531 - RNA, 22 nt, synthetic construct
  misc_feature 1..22: note = Synthetic oligonucleotide
  source 1..22: mol_type = other RNA
caggtgcagctctcagctgggg

SEQ ID NO: 532 - RNA, 22 nt, synthetic construct
  misc_feature 1..22: note = Synthetic oligonucleotide
  source 1..22: mol_type = other RNA
aggtgcagctctcagctggggt

SEQ ID NO: 533 - RNA, 22 nt, synthetic construct
  misc_feature 1..22: note = Synthetic oligonucleotide
  source 1..22: mol_type = other RNA
ggtgcagctctcagctggggtg

SEQ ID NO: 534 - RNA, 22 nt, synthetic construct
  misc_feature 1..22: note = Synthetic oligonucleotide
  source 1..22: mol_type = other RNA
gtgcagctctcagctggggtgt

SEQ ID NO: 535 - RNA, 22 nt, synthetic construct
  misc_feature 1..22: note = Synthetic oligonucleotide
  source 1..22: mol_type = other RNA
tgcagctctcagctggggtgtt

SEQ ID NO: 536 - RNA, 22 nt, synthetic construct
  misc_feature 1..22: note = Synthetic oligonucleotide
  source 1..22: mol_type = other RNA
gcagctctcagctggggtgttc

SEQ ID NO: 537 - RNA, 22 nt, synthetic construct
  misc_feature 1..22: note = Synthetic oligonucleotide
  source 1..22: mol_type = other RNA
cagctctcagctggggtgttca

SEQ ID NO: 538 - RNA, 22 nt, synthetic construct
  misc_feature 1..22: note = Synthetic oligonucleotide
  source 1..22: mol_type = other RNA
agctctcagctggggtgttcag

SEQ ID NO: 539 - RNA, 22 nt, synthetic construct
  misc_feature 1..22: note = Synthetic oligonucleotide
  source 1..22: mol_type = other RNA
gctctcagctggggtgttcaga

SEQ ID NO: 540 - RNA, 22 nt, synthetic construct
  misc_feature 1..22: note = Synthetic oligonucleotide
  source 1..22: mol_type = other RNA
ctctcagctggggtgttcagag

SEQ ID NO: 541 - RNA, 22 nt, synthetic construct
  misc_feature 1..22: note = Synthetic oligonucleotide
  source 1..22: mol_type = other RNA
tctcagctggggtgttcagagg

SEQ ID NO: 542 - RNA, 22 nt, synthetic construct
  misc_feature 1..22: note = Synthetic oligonucleotide
  source 1..22: mol_type = other RNA
ctcagctggggtgttcagagga

SEQ ID NO: 543 - RNA, 22 nt, synthetic construct
  misc_feature 1..22: note = Synthetic oligonucleotide
  source 1..22: mol_type = other RNA
tcagctggggtgttcagaggac

SEQ ID NO: 544 - RNA, 22 nt, synthetic construct
  misc_feature 1..22: note = Synthetic oligonucleotide
  source 1..22: mol_type = other RNA
cagctggggtgttcagaggacg

SEQ ID NO: 545 - RNA, 22 nt, synthetic construct
  misc_feature 1..22: note = Synthetic oligonucleotide
  source 1..22: mol_type = other RNA
agctggggtgttcagaggacgc

SEQ ID NO: 546 - RNA, 22 nt, synthetic construct
  misc_feature 1..22: note = Synthetic oligonucleotide
  source 1..22: mol_type = other RNA
gctggggtgttcagaggacgcc

SEQ ID NO: 547 - RNA, 22 nt, synthetic construct
  misc_feature 1..22: note = Synthetic oligonucleotide
  source 1..22: mol_type = other RNA
ctggggtgttcagaggacgcct

SEQ ID NO: 548 - RNA, 22 nt, synthetic construct
  misc_feature 1..22: note = Synthetic oligonucleotide
  source 1..22: mol_type = other RNA
tggggtgttcagaggacgcctg

SEQ ID NO: 549 - RNA, 22 nt, synthetic construct
  misc_feature 1..22: note = Synthetic oligonucleotide
  source 1..22: mol_type = other RNA
ggggtgttcagaggacgcctgt

SEQ ID NO: 550 - RNA, 22 nt, synthetic construct
  misc_feature 1..22: note = Synthetic oligonucleotide
  source 1..22: mol_type = other RNA
gggtgttcagaggacgcctgtg

SEQ ID NO: 551 - RNA, 22 nt, synthetic construct
  misc_feature 1..22: note = Synthetic oligonucleotide
  source 1..22: mol_type = other RNA
ggtgttcagaggacgcctgtgt

SEQ ID NO: 552 - RNA, 22 nt, synthetic construct
  misc_feature 1..22: note = Synthetic oligonucleotide
  source 1..22: mol_type = other RNA
gtgttcagaggacgcctgtgtc

SEQ ID NO: 553 - RNA, 22 nt, synthetic construct
  misc_feature 1..22: note = Synthetic oligonucleotide
  source 1..22: mol_type = other RNA
tgttcagaggacgcctgtgtcc

SEQ ID NO: 554 - RNA, 22 nt, synthetic construct
  misc_feature 1..22: note = Synthetic oligonucleotide
  source 1..22: mol_type = other RNA
gttcagaggacgcctgtgtcct

SEQ ID NO: 555 - RNA, 22 nt, synthetic construct
  misc_feature 1..22: note = Synthetic oligonucleotide
  source 1..22: mol_type = other RNA
ttcagaggacgcctgtgtcctc

SEQ ID NO: 556 - RNA, 22 nt, synthetic construct
  misc_feature 1..22: note = Synthetic oligonucleotide
  source 1..22: mol_type = other RNA
tcagaggacgcctgtgtcctcc

SEQ ID NO: 557 - RNA, 22 nt, synthetic construct
  misc_feature 1..22: note = Synthetic oligonucleotide
  source 1..22: mol_type = other RNA
cagaggacgcctgtgtcctccc

SEQ ID NO: 558 - RNA, 22 nt, synthetic construct
  misc_feature 1..22: note = Synthetic oligonucleotide
  source 1..22: mol_type = other RNA
agaggacgcctgtgtcctcccc

SEQ ID NO: 559 - RNA, 22 nt, synthetic construct
  misc_feature 1..22: note = Synthetic oligonucleotide
  source 1..22: mol_type = other RNA
gaggacgcctgtgtcctcccct

SEQ ID NO: 560 - RNA, 22 nt, synthetic construct
  misc_feature 1..22: note = Synthetic oligonucleotide
  source 1..22: mol_type = other RNA
aggacgcctgtgtcctcccctc

SEQ ID NO: 561 - RNA, 22 nt, synthetic construct
  misc_feature 1..22: note = Synthetic oligonucleotide
  source 1..22: mol_type = other RNA
ctctgtcacccttggaggcaga

SEQ ID NO: 562 - RNA, 22 nt, synthetic construct
  misc_feature 1..22: note = Synthetic oligonucleotide
  source 1..22: mol_type = other RNA
tctgtcacccttggaggcagag

SEQ ID NO: 563 - RNA, 22 nt, synthetic construct
  misc_feature 1..22: note = Synthetic oligonucleotide
  source 1..22: mol_type = other RNA
ctgtcacccttggaggcagaga

SEQ ID NO: 564 - RNA, 22 nt, synthetic construct
  misc_feature 1..22: note = Synthetic oligonucleotide
  source 1..22: mol_type = other RNA
tgtcacccttggaggcagagaa

SEQ ID NO: 565 - RNA, 22 nt, synthetic construct
  misc_feature 1..22: note = Synthetic oligonucleotide
  source 1..22: mol_type = other RNA
gtcacccttggaggcagagaac

SEQ ID NO: 566 - RNA, 22 nt, synthetic construct
  misc_feature 1..22: note = Synthetic oligonucleotide
  source 1..22: mol_type = other RNA
tcacccttggaggcagagaact

SEQ ID NO: 567 - RNA, 22 nt, synthetic construct
  misc_feature 1..22: note = Synthetic oligonucleotide
  source 1..22: mol_type = other RNA
cacccttggaggcagagaactt

SEQ ID NO: 568 - RNA, 22 nt, synthetic construct
  misc_feature 1..22: note = Synthetic oligonucleotide
  source 1..22: mol_type = other RNA
acccttggaggcagagaacttt

SEQ ID NO: 569 - RNA, 22 nt, synthetic construct
  misc_feature 1..22: note = Synthetic oligonucleotide
  source 1..22: mol_type = other RNA
cccttggaggcagagaactttg

SEQ ID NO: 570 - RNA, 22 nt, synthetic construct
  misc_feature 1..22: note = Synthetic oligonucleotide
  source 1..22: mol_type = other RNA
ccttggaggcagagaactttgc

SEQ ID NO: 571 - RNA, 22 nt, synthetic construct
  misc_feature 1..22: note = Synthetic oligonucleotide
  source 1..22: mol_type = other RNA
cttggaggcagagaactttgcc

SEQ ID NO: 572 - RNA, 22 nt, synthetic construct
  misc_feature 1..22: note = Synthetic oligonucleotide
  source 1..22: mol_type = other RNA
ttggaggcagagaactttgccc

SEQ ID NO: 573 - RNA, 20 nt, synthetic construct
  misc_feature 1..20: note = Synthetic oligonucleotide
  source 1..20: mol_type = other RNA
taagatgtggaccgctggag

SEQ ID NO: 574 - RNA, 20 nt, synthetic construct
  misc_feature 1..20: note = Synthetic oligonucleotide
  source 1..20: mol_type = other RNA
aagatgtggaccgctggaga

SEQ ID NO: 575 - RNA, 20 nt, synthetic construct
  misc_feature 1..20: note = Synthetic oligonucleotide
  source 1..20: mol_type = other RNA
agatgtggaccgctggagaa

SEQ ID NO: 576 - RNA, 20 nt, synthetic construct
  misc_feature 1..20: note = Synthetic oligonucleotide
  source 1..20: mol_type = other RNA
gatgtggaccgctggagaat

SEQ ID NO: 577 - RNA, 20 nt, synthetic construct
  misc_feature 1..20: note = Synthetic oligonucleotide
  source 1..20: mol_type = other RNA
atgtggaccgctggagaatg

SEQ ID NO: 578 - RNA, 20 nt, synthetic construct
  misc_feature 1..20: note = Synthetic oligonucleotide
  source 1..20: mol_type = other RNA
tgtggaccgctggagaatgg

SEQ ID NO: 579 - RNA, 20 nt, synthetic construct
  misc_feature 1..20: note = Synthetic oligonucleotide
  source 1..20: mol_type = other RNA
gtggaccgctggagaatggg

SEQ ID NO: 580 - RNA, 20 nt, synthetic construct
  misc_feature 1..20: note = Synthetic oligonucleotide
  source 1..20: mol_type = other RNA
tggaccgctggagaatgggg

SEQ ID NO: 581 - RNA, 20 nt, synthetic construct
  misc_feature 1..20: note = Synthetic oligonucleotide
  source 1..20: mol_type = other RNA
ggtgctgcctgcagtcaaaa

SEQ ID NO: 582 - RNA, 20 nt, synthetic construct
  misc_feature 1..20: note = Synthetic oligonucleotide
  source 1..20: mol_type = other RNA
gtgctgcctgcagtcaaaac

SEQ ID NO: 583 - RNA, 20 nt, synthetic construct
  misc_feature 1..20: note = Synthetic oligonucleotide
  source 1..20: mol_type = other RNA
tgctgcctgcagtcaaaacg

SEQ ID NO: 584 - RNA, 20 nt, synthetic construct
  misc_feature 1..20: note = Synthetic oligonucleotide
  source 1..20: mol_type = other RNA
gctgcctgcagtcaaaacgg

SEQ ID NO: 585 - RNA, 20 nt, synthetic construct
  misc_feature 1..20: note = Synthetic oligonucleotide
  source 1..20: mol_type = other RNA
ctgcctgcagtcaaaacgga

SEQ ID NO: 586 - RNA, 20 nt, synthetic construct
  misc_feature 1..20: note = Synthetic oligonucleotide
  source 1..20: mol_type = other RNA
tgcctgcagtcaaaacggag

SEQ ID NO: 587 - RNA, 20 nt, synthetic construct
  misc_feature 1..20: note = Synthetic oligonucleotide
  source 1..20: mol_type = other RNA
gcctgcagtcaaaacggagt

SEQ ID NO: 588 - RNA, 20 nt, synthetic construct
  misc_feature 1..20: note = Synthetic oligonucleotide
  source 1..20: mol_type = other RNA
cctgcagtcaaaacggagtg

SEQ ID NO: 589 - RNA, 20 nt, synthetic construct
  misc_feature 1..20: note = Synthetic oligonucleotide
  source 1..20: mol_type = other RNA
ctgcagtcaaaacggagtgg

SEQ ID NO: 590 - RNA, 20 nt, synthetic construct
  misc_feature 1..20: note = Synthetic oligonucleotide
  source 1..20: mol_type = other RNA
tgcagtcaaaacggagtggg

SEQ ID NO: 591 - RNA, 20 nt, synthetic construct
  misc_feature 1..20: note = Synthetic oligonucleotide
  source 1..20: mol_type = other RNA
gcagtcaaaacggagtgggg

SEQ ID NO: 592 - RNA, 20 nt, synthetic construct
  misc_feature 1..20: note = Synthetic oligonucleotide
  source 1..20: mol_type = other RNA
tgcccagctcagggccagaa

SEQ ID NO: 593 - RNA, 20 nt, synthetic construct
  misc_feature 1..20: note = Synthetic oligonucleotide
  source 1..20: mol_type = other RNA
gcccagctcagggccagaat

SEQ ID NO: 594 - RNA, 20 nt, synthetic construct
  misc_feature 1..20: note = Synthetic oligonucleotide
  source 1..20: mol_type = other RNA
cccagctcagggccagaatg

SEQ ID NO: 595 - RNA, 20 nt, synthetic construct
  misc_feature 1..20: note = Synthetic oligonucleotide
  source 1..20: mol_type = other RNA
ccagctcagggccagaatga

SEQ ID NO: 596 - RNA, 20 nt, synthetic construct
  misc_feature 1..20: note = Synthetic oligonucleotide
  source 1..20: mol_type = other RNA
cagctcagggccagaatgat

SEQ ID NO: 597 - RNA, 20 nt, synthetic construct
  misc_feature 1..20: note = Synthetic oligonucleotide
  source 1..20: mol_type = other RNA
agctcagggccagaatgatc

SEQ ID NO: 598 - RNA, 20 nt, synthetic construct
  misc_feature 1..20: note = Synthetic oligonucleotide
  source 1..20: mol_type = other RNA
gctcagggccagaatgatcc

SEQ ID NO: 599 - RNA, 20 nt, synthetic construct
  misc_feature 1..20: note = Synthetic oligonucleotide
  source 1..20: mol_type = other RNA
ctcagggccagaatgatcct

SEQ ID NO: 600 - RNA, 20 nt, synthetic construct
  misc_feature 1..20: note = Synthetic oligonucleotide
  source 1..20: mol_type = other RNA
tcagggccagaatgatccta

SEQ ID NO: 601 - RNA, 20 nt, synthetic construct
  misc_feature 1..20: note = Synthetic oligonucleotide
  source 1..20: mol_type = other RNA
cagggccagaatgatcctat

SEQ ID NO: 602 - RNA, 20 nt, synthetic construct
  misc_feature 1..20: note = Synthetic oligonucleotide
  source 1..20: mol_type = other RNA
agggccagaatgatcctatt

SEQ ID NO: 603 - RNA, 20 nt, synthetic construct
  misc_feature 1..20: note = Synthetic oligonucleotide
  source 1..20: mol_type = other RNA
gggccagaatgatcctattc

SEQ ID NO: 604 - RNA, 20 nt, synthetic construct
  misc_feature 1..20: note = Synthetic oligonucleotide
  source 1..20: mol_type = other RNA
ggccagaatgatcctattcc

SEQ ID NO: 605 - RNA, 20 nt, synthetic construct
  misc_feature 1..20: note = Synthetic oligonucleotide
  source 1..20: mol_type = other RNA
gccagaatgatcctattccc

SEQ ID NO: 606 - RNA, 20 nt, synthetic construct
  misc_feature 1..20: note = Synthetic oligonucleotide
  source 1..20: mol_type = other RNA
ccagaatgatcctattcccg

SEQ ID NO: 607 - RNA, 20 nt, synthetic construct
  misc_feature 1..20: note = Synthetic oligonucleotide
  source 1..20: mol_type = other RNA
cagaatgatcctattcccgg

SEQ ID NO: 608 - RNA, 20 nt, synthetic construct
  misc_feature 1..20: note = Synthetic oligonucleotide
  source 1..20: mol_type = other RNA
agaatgatcctattcccggc

SEQ ID NO: 609 - RNA, 20 nt, synthetic construct
  misc_feature 1..20: note = Synthetic oligonucleotide
  source 1..20: mol_type = other RNA
gaatgatcctattcccggca

SEQ ID NO: 610 - RNA, 20 nt, synthetic construct
  misc_feature 1..20: note = Synthetic oligonucleotide
  source 1..20: mol_type = other RNA
aatgatcctattcccggcac

SEQ ID NO: 611 - RNA, 20 nt, synthetic construct
  misc_feature 1..20: note = Synthetic oligonucleotide
  source 1..20: mol_type = other RNA
atgatcctattcccggcact

SEQ ID NO: 612 - RNA, 20 nt, synthetic construct
  misc_feature 1..20: note = Synthetic oligonucleotide
  source 1..20: mol_type = other RNA
tgatcctattcccggcactt

SEQ ID NO: 613 - RNA, 20 nt, synthetic construct
  misc_feature 1..20: note = Synthetic oligonucleotide
  source 1..20: mol_type = other RNA
gatcctattcccggcacttc

SEQ ID NO: 614 - RNA, 20 nt, synthetic construct
  misc_feature 1..20: note = Synthetic oligonucleotide
  source 1..20: mol_type = other RNA
atcctattcccggcacttct

SEQ ID NO: 615 - RNA, 20 nt, synthetic construct
  misc_feature 1..20: note = Synthetic oligonucleotide
  source 1..20: mol_type = other RNA
tcctattcccggcacttctc

SEQ ID NO: 616 - RNA, 20 nt, synthetic construct
  misc_feature 1..20: note = Synthetic oligonucleotide
  source 1..20: mol_type = other RNA
cctattcccggcacttctca

SEQ ID NO: 617 - RNA, 20 nt, synthetic construct
  misc_feature 1..20: note = Synthetic oligonucleotide
  source 1..20: mol_type = other RNA
ctattcccggcacttctcag

SEQ ID NO: 618 - RNA, 20 nt, synthetic construct
  misc_feature 1..20: note = Synthetic oligonucleotide
  source 1..20: mol_type = other RNA
tattcccggcacttctcagt

SEQ ID NO: 619 - RNA, 20 nt, synthetic construct
  misc_feature 1..20: note = Synthetic oligonucleotide
  source 1..20: mol_type = other RNA
attcccggcacttctcagtg

SEQ ID NO: 620 - RNA, 20 nt, synthetic construct
  misc_feature 1..20: note = Synthetic oligonucleotide
  source 1..20: mol_type = other RNA
ttcccggcacttctcagtga

SEQ ID NO: 621 - RNA, 20 nt, synthetic construct
  misc_feature 1..20: note = Synthetic oligonucleotide
  source 1..20: mol_type = other RNA
tcccggcacttctcagtgag

SEQ ID NO: 622 - RNA, 20 nt, synthetic construct
  misc_feature 1..20: note = Synthetic oligonucleotide
  source 1..20: mol_type = other RNA
cccggcacttctcagtgagg

SEQ ID NO: 623 - RNA, 20 nt, synthetic construct
  misc_feature 1..20: note = Synthetic oligonucleotide
  source 1..20: mol_type = other RNA
ccggcacttctcagtgaggc

SEQ ID NO: 624 - RNA, 20 nt, synthetic construct
  misc_feature 1..20: note = Synthetic oligonucleotide
  source 1..20: mol_type = other RNA
cggcacttctcagtgaggct

SEQ ID NO: 625 - RNA, 20 nt, synthetic construct
  misc_feature 1..20: note = Synthetic oligonucleotide
  source 1..20: mol_type = other RNA
ggcacttctcagtgaggctc

SEQ ID NO: 626 - RNA, 20 nt, synthetic construct
  misc_feature 1..20: note = Synthetic oligonucleotide
  source 1..20: mol_type = other RNA
gcacttctcagtgaggctct

SEQ ID NO: 627 - RNA, 20 nt, synthetic construct
  misc_feature 1..20: note = Synthetic oligonucleotide
  source 1..20: mol_type = other RNA
cacttctcagtgaggctctg

SEQ ID NO: 628 - RNA, 20 nt, synthetic construct
  misc_feature 1..20: note = Synthetic oligonucleotide
  source 1..20: mol_type = other RNA
acttctcagtgaggctctgt

SEQ ID NO: 629 - RNA, 20 nt, synthetic construct
  misc_feature 1..20: note = Synthetic oligonucleotide
  source 1..20: mol_type = other RNA
cttctcagtgaggctctgtg

SEQ ID NO: 630 - RNA, 20 nt, synthetic construct
  misc_feature 1..20: note = Synthetic oligonucleotide
  source 1..20: mol_type = other RNA
ttctcagtgaggctctgtgg

SEQ ID NO: 631 - RNA, 20 nt, synthetic construct
  misc_feature 1..20: note = Synthetic oligonucleotide
  source 1..20: mol_type = other RNA
tctcagtgaggctctgtggc

SEQ ID NO: 632 - RNA, 20 nt, synthetic construct
  misc_feature 1..20: note = Synthetic oligonucleotide
  source 1..20: mol_type = other RNA
ctcagtgaggctctgtggct

SEQ ID NO: 633 - RNA, 20 nt, synthetic construct
  misc_feature 1..20: note = Synthetic oligonucleotide
  source 1..20: mol_type = other RNA
tcagtgaggctctgtggctc

SEQ ID NO: 634 - RNA, 20 nt, synthetic construct
  misc_feature 1..20: note = Synthetic oligonucleotide
  source 1..20: mol_type = other RNA
cagtgaggctctgtggctca

SEQ ID NO: 635 - RNA, 20 nt, synthetic construct
  misc_feature 1..20: note = Synthetic oligonucleotide
  source 1..20: mol_type = other RNA
agtgaggctctgtggctcac

SEQ ID NO: 636 - RNA, 20 nt, synthetic construct
  misc_feature 1..20: note = Synthetic oligonucleotide
  source 1..20: mol_type = other RNA
gtgaggctctgtggctcacc

SEQ ID NO: 637 - RNA, 20 nt, synthetic construct
  misc_feature 1..20: note = Synthetic oligonucleotide
  source 1..20: mol_type = other RNA
tgaggctctgtggctcacct

SEQ ID NO: 638 - RNA, 20 nt, synthetic construct
  misc_feature 1..20: note = Synthetic oligonucleotide
  source 1..20: mol_type = other RNA
gaggctctgtggctcaccta

SEQ ID NO: 639 - RNA, 20 nt, synthetic construct
  misc_feature 1..20: note = Synthetic oligonucleotide
  source 1..20: mol_type = other RNA
aggctctgtggctcacctaa

SEQ ID NO: 640 - RNA, 20 nt, synthetic construct
  misc_feature 1..20: note = Synthetic oligonucleotide
  source 1..20: mol_type = other RNA
ggctctgtggctcacctaag

SEQ ID NO: 641 - RNA, 20 nt, synthetic construct
  misc_feature 1..20: note = Synthetic oligonucleotide
  source 1..20: mol_type = other RNA
gctctgtggctcacctaaga

SEQ ID NO: 642 - RNA, 20 nt, synthetic construct
  misc_feature 1..20: note = Synthetic oligonucleotide
  source 1..20: mol_type = other RNA
ctctgtggctcacctaagaa

SEQ ID NO: 643 - RNA, 20 nt, synthetic construct
  misc_feature 1..20: note = Synthetic oligonucleotide
  source 1..20: mol_type = other RNA
tctgtggctcacctaagaaa

SEQ ID NO: 644 - RNA, 20 nt, synthetic construct
  misc_feature 1..20: note = Synthetic oligonucleotide
  source 1..20: mol_type = other RNA
ctgtggctcacctaagaaac

SEQ ID NO: 645 - RNA, 20 nt, synthetic construct
  misc_feature 1..20: note = Synthetic oligonucleotide
  source 1..20: mol_type = other RNA
tgtggctcacctaagaaacc

SEQ ID NO: 646 - RNA, 20 nt, synthetic construct
  misc_feature 1..20: note = Synthetic oligonucleotide
  source 1..20: mol_type = other RNA
gtggctcacctaagaaacca

SEQ ID NO: 647 - RNA, 20 nt, synthetic construct
  misc_feature 1..20: note = Synthetic oligonucleotide
  source 1..20: mol_type = other RNA
tggctcacctaagaaaccag

SEQ ID NO: 648 - RNA, 20 nt, synthetic construct
  misc_feature 1..20: note = Synthetic oligonucleotide
  source 1..20: mol_type = other RNA
ggctcacctaagaaaccagc

SEQ ID NO: 649 - RNA, 20 nt, synthetic construct
  misc_feature 1..20: note = Synthetic oligonucleotide
  source 1..20: mol_type = other RNA
gctcacctaagaaaccagcc

SEQ ID NO: 650 - RNA, 20 nt, synthetic construct
  misc_feature 1..20: note = Synthetic oligonucleotide
  source 1..20: mol_type = other RNA
ctcacctaagaaaccagcct

SEQ ID NO: 651 - RNA, 20 nt, synthetic construct
  misc_feature 1..20: note = Synthetic oligonucleotide
  source 1..20: mol_type = other RNA
tcacctaagaaaccagcctc

SEQ ID NO: 652 - RNA, 20 nt, synthetic construct
  misc_feature 1..20: note = Synthetic oligonucleotide
  source 1..20: mol_type = other RNA
cacctaagaaaccagcctcc

SEQ ID NO: 653 - RNA, 20 nt, synthetic construct
  misc_feature 1..20: note = Synthetic oligonucleotide
  source 1..20: mol_type = other RNA
acctaagaaaccagcctccc

SEQ ID NO: 654 - RNA, 20 nt, synthetic construct
  misc_feature 1..20: note = Synthetic oligonucleotide
  source 1..20: mol_type = other RNA
cctaagaaaccagcctccct

SEQ ID NO: 655 - RNA, 20 nt, synthetic construct
  misc_feature 1..20: note = Synthetic oligonucleotide
  source 1..20: mol_type = other RNA
ctaagaaaccagcctccctt

SEQ ID NO: 656 - RNA, 20 nt, synthetic construct
  misc_feature 1..20: note = Synthetic oligonucleotide
  source 1..20: mol_type = other RNA
taagaaaccagcctcccttg

SEQ ID NO: 657 - RNA, 20 nt, synthetic construct
  misc_feature 1..20: note = Synthetic oligonucleotide
  source 1..20: mol_type = other RNA
aagaaaccagcctcccttgc

SEQ ID NO: 658 - RNA, 20 nt, synthetic construct
  misc_feature 1..20: note = Synthetic oligonucleotide
  source 1..20: mol_type = other RNA
agaaaccagcctcccttgca

SEQ ID NO: 659 - RNA, 20 nt, synthetic construct
  misc_feature 1..20: note = Synthetic oligonucleotide
  source 1..20: mol_type = other RNA
gaaaccagcctcccttgcag

SEQ ID NO: 660 - RNA, 20 nt, synthetic construct
  misc_feature 1..20: note = Synthetic oligonucleotide
  source 1..20: mol_type = other RNA
aaaccagcctcccttgcagg

SEQ ID NO: 661 - RNA, 20 nt, synthetic construct
  misc_feature 1..20: note = Synthetic oligonucleotide
  source 1..20: mol_type = other RNA
aaccagcctcccttgcaggc

SEQ ID NO: 662 - RNA, 20 nt, synthetic construct
  misc_feature 1..20: note = Synthetic oligonucleotide
  source 1..20: mol_type = other RNA
accagcctcccttgcaggca

SEQ ID NO: 663 - RNA, 20 nt, synthetic construct
  misc_feature 1..20: note = Synthetic oligonucleotide
  source 1..20: mol_type = other RNA
ccagcctcccttgcaggcaa

SEQ ID NO: 664 - RNA, 20 nt, synthetic construct
  misc_feature 1..20: note = Synthetic oligonucleotide
  source 1..20: mol_type = other RNA
cagcctcccttgcaggcaac

SEQ ID NO: 665 - RNA, 20 nt, synthetic construct
  misc_feature 1..20: note = Synthetic oligonucleotide
  source 1..20: mol_type = other RNA
agcctcccttgcaggcaacg

SEQ ID NO: 666 - RNA, 20 nt, synthetic construct
  misc_feature 1..20: note = Synthetic oligonucleotide
  source 1..20: mol_type = other RNA
gcctcccttgcaggcaacgg

SEQ ID NO: 667 - RNA, 20 nt, synthetic construct
  misc_feature 1..20: note = Synthetic oligonucleotide
  source 1..20: mol_type = other RNA
cctcccttgcaggcaacggc

SEQ ID NO: 668 - RNA, 20 nt, synthetic construct
  misc_feature 1..20: note = Synthetic oligonucleotide
  source 1..20: mol_type = other RNA
tcccttgcaggcaacggcct

SEQ ID NO: 669 - RNA, 20 nt, synthetic construct
  misc_feature 1..20: note = Synthetic oligonucleotide
  source 1..20: mol_type = other RNA
cccttgcaggcaacggccta

SEQ ID NO: 670 - RNA, 20 nt, synthetic construct
  misc_feature 1..20: note = Synthetic oligonucleotide
  source 1..20: mol_type = other RNA
ccttgcaggcaacggcctag

SEQ ID NO: 671 - RNA, 20 nt, synthetic construct
  misc_feature 1..20: note = Synthetic oligonucleotide
  source 1..20: mol_type = other RNA
cttgcaggcaacggcctagc

SEQ ID NO: 672 - RNA, 20 nt, synthetic construct
  misc_feature 1..20: note = Synthetic oligonucleotide
  source 1..20: mol_type = other RNA
ttgcaggcaacggcctagct

SEQ ID NO: 673 - RNA, 20 nt, synthetic construct
  misc_feature 1..20: note = Synthetic oligonucleotide
  source 1..20: mol_type = other RNA
tgcaggcaacggcctagctg

SEQ ID NO: 674 - RNA, 20 nt, synthetic construct
  misc_feature 1..20: note = Synthetic oligonucleotide
  source 1..20: mol_type = other RNA
gcaggcaacggcctagctgg

SEQ ID NO: 675 - RNA, 20 nt, synthetic construct
  misc_feature 1..20: note = Synthetic oligonucleotide
  source 1..20: mol_type = other RNA
caggcaacggcctagctggc

SEQ ID NO: 676 - RNA, 20 nt, synthetic construct
  misc_feature 1..20: note = Synthetic oligonucleotide
  source 1..20: mol_type = other RNA
ggcaacggcctagctggcct

SEQ ID NO: 677 - RNA, 20 nt, synthetic construct
  misc_feature 1..20: note = Synthetic oligonucleotide
  source 1..20: mol_type = other RNA
gcaacggcctagctggcctg

SEQ ID NO: 678 - RNA, 20 nt, synthetic construct
  misc_feature 1..20: note = Synthetic oligonucleotide
  source 1..20: mol_type = other RNA
aacggcctagctggcctggt

SEQ ID NO: 679 - RNA, 20 nt, synthetic construct
  misc_feature 1..20: note = Synthetic oligonucleotide
  source 1..20: mol_type = other RNA
acggcctagctggcctggtc

SEQ ID NO: 680 - RNA, 20 nt, synthetic construct
  misc_feature 1..20: note = Synthetic oligonucleotide
  source 1..20: mol_type = other RNA
cggcctagctggcctggtct

SEQ ID NO: 681 - RNA, 20 nt, synthetic construct
  misc_feature 1..20: note = Synthetic oligonucleotide
  source 1..20: mol_type = other RNA
ggcctagctggcctggtctg

SEQ ID NO: 682 - RNA, 20 nt, synthetic construct
  misc_feature 1..20: note = Synthetic oligonucleotide
  source 1..20: mol_type = other RNA
cctagctggcctggtctgga

SEQ ID NO: 683 - RNA, 20 nt, synthetic construct
  misc_feature 1..20: note = Synthetic oligonucleotide
  source 1..20: mol_type = other RNA
ctagctggcctggtctggag

SEQ ID NO: 684 - RNA, 20 nt, synthetic construct
  misc_feature 1..20: note = Synthetic oligonucleotide
  source 1..20: mol_type = other RNA
tagctggcctggtctggagg

SEQ ID NO: 685 - RNA, 20 nt, synthetic construct
  misc_feature 1..20: note = Synthetic oligonucleotide
  source 1..20: mol_type = other RNA
agctggcctggtctggaggc

SEQ ID NO: 686 - RNA, 20 nt, synthetic construct
  misc_feature 1..20: note = Synthetic oligonucleotide
  source 1..20: mol_type = other RNA
gctggcctggtctggaggct

SEQ ID NO: 687 - RNA, 20 nt, synthetic construct
  misc_feature 1..20: note = Synthetic oligonucleotide
  source 1..20: mol_type = other RNA
ctggcctggtctggaggctc

SEQ ID NO: 688 - RNA, 20 nt, synthetic construct
  misc_feature 1..20: note = Synthetic oligonucleotide
  source 1..20: mol_type = other RNA
tggcctggtctggaggctct

SEQ ID NO: 689 - RNA, 20 nt, synthetic construct
  misc_feature 1..20: note = Synthetic oligonucleotide
  source 1..20: mol_type = other RNA
ggcctggtctggaggctctc

SEQ ID NO: 690 - RNA, 20 nt, synthetic construct
  misc_feature 1..20: note = Synthetic oligonucleotide
  source 1..20: mol_type = other RNA
tacatccacacccaagatac

SEQ ID NO: 691 - RNA, 20 nt, synthetic construct
  misc_feature 1..20: note = Synthetic oligonucleotide
  source 1..20: mol_type = other RNA
ttgagatttgactcgcatga

SEQ ID NO: 692 - RNA, 20 nt, synthetic construct
  misc_feature 1..20: note = Synthetic oligonucleotide
  source 1..20: mol_type = other RNA
tgagatttgactcgcatgat

SEQ ID NO: 693 - RNA, 20 nt, synthetic construct
  misc_feature 1..20: note = Synthetic oligonucleotide
  source 1..20: mol_type = other RNA
agatttgactcgcatgattg

SEQ ID NO: 694 - RNA, 20 nt, synthetic construct
  misc_feature 1..20: note = Synthetic oligonucleotide
  source 1..20: mol_type = other RNA
gatttgactcgcatgattgc

SEQ ID NO: 695 - RNA, 20 nt, synthetic construct
  misc_feature 1..20: note = Synthetic oligonucleotide
  source 1..20: mol_type = other RNA
atttgactcgcatgattgct

SEQ ID NO: 696 - RNA, 20 nt, synthetic construct
  misc_feature 1..20: note = Synthetic oligonucleotide
  source 1..20: mol_type = other RNA
tttgactcgcatgattgcta

SEQ ID NO: 697 - RNA, 20 nt, synthetic construct
  misc_feature 1..20: note = Synthetic oligonucleotide
  source 1..20: mol_type = other RNA
tgactcgcatgattgctatg

SEQ ID NO: 698 - RNA, 20 nt, synthetic construct
  misc_feature 1..20: note = Synthetic oligonucleotide
  source 1..20: mol_type = other RNA
gactcgcatgattgctatgg

SEQ ID NO: 699 - RNA, 20 nt, synthetic construct
  misc_feature 1..20: note = Synthetic oligonucleotide
  source 1..20: mol_type = other RNA
actcgcatgattgctatggg

SEQ ID NO: 700 - RNA, 20 nt, synthetic construct
  misc_feature 1..20: note = Synthetic oligonucleotide
  source 1..20: mol_type = other RNA
ctcgcatgattgctatggga

SEQ ID NO: 701 - RNA, 20 nt, synthetic construct
  misc_feature 1..20: note = Synthetic oligonucleotide
  source 1..20: mol_type = other RNA
tcgcatgattgctatgggac

SEQ ID NO: 702 - RNA, 20 nt, synthetic construct
  misc_feature 1..20: note = Synthetic oligonucleotide
  source 1..20: mol_type = other RNA
cgcatgattgctatgggaca

SEQ ID NO: 703 - RNA, 20 nt, synthetic construct
  misc_feature 1..20: note = Synthetic oligonucleotide
  source 1..20: mol_type = other RNA
gcatgattgctatgggacaa

SEQ ID NO: 704 - RNA, 20 nt, synthetic construct
  misc_feature 1..20: note = Synthetic oligonucleotide
  source 1..20: mol_type = other RNA
catgattgctatgggacaag

SEQ ID NO: 705 - RNA, 20 nt, synthetic construct
  misc_feature 1..20: note = Synthetic oligonucleotide
  source 1..20: mol_type = other RNA
atgattgctatgggacaagt

SEQ ID NO: 706 - RNA, 20 nt, synthetic construct
  misc_feature 1..20: note = Synthetic oligonucleotide
  source 1..20: mol_type = other RNA
tgattgctatgggacaagtt

SEQ ID NO: 707 - RNA, 20 nt, synthetic construct
  misc_feature 1..20: note = Synthetic oligonucleotide
  source 1..20: mol_type = other RNA
ttgctatgggacaagttttc

SEQ ID NO: 708 - RNA, 20 nt, synthetic construct
  misc_feature 1..20: note = Synthetic oligonucleotide
  source 1..20: mol_type = other RNA
ctatgggacaagttttcatc

SEQ ID NO: 709 - RNA, 20 nt, synthetic construct
  misc_feature 1..20: note = Synthetic oligonucleotide
  source 1..20: mol_type = other RNA
tatgggacaagttttcatct

SEQ ID NO: 710 - RNA, 20 nt, synthetic construct
  misc_feature 1..20: note = Synthetic oligonucleotide
  source 1..20: mol_type = other RNA
atgggacaagttttcatctg

SEQ ID NO: 711 - RNA, 20 nt, synthetic construct
  misc_feature 1..20: note = Synthetic oligonucleotide
  source 1..20: mol_type = other RNA
tgggacaagttttcatctgc

SEQ ID NO: 712 - RNA, 20 nt, synthetic construct
  misc_feature 1..20: note = Synthetic oligonucleotide
  source 1..20: mol_type = other RNA
gggacaagttttcatctgca

SEQ ID NO: 713 - RNA, 20 nt, synthetic construct
  misc_feature 1..20: note = Synthetic oligonucleotide
  source 1..20: mol_type = other RNA
ggacaagttttcatctgcag

SEQ ID NO: 714 - RNA, 20 nt, synthetic construct
  misc_feature 1..20: note = Synthetic oligonucleotide
  source 1..20: mol_type = other RNA
gacaagttttcatctgcagt

SEQ ID NO: 715 - RNA, 20 nt, synthetic construct
  misc_feature 1..20: note = Synthetic oligonucleotide
  source 1..20: mol_type = other RNA
acaagttttcatctgcagtt

SEQ ID NO: 716 - RNA, 20 nt, synthetic construct
  misc_feature 1..20: note = Synthetic oligonucleotide
  source 1..20: mol_type = other RNA
gcagtttaaatctgtttccc

SEQ ID NO: 717 - RNA, 20 nt, synthetic construct
  misc_feature 1..20: note = Synthetic oligonucleotide
  source 1..20: mol_type = other RNA
ggggtttggaattctagatc

SEQ ID NO: 718 - RNA, 20 nt, synthetic construct
  misc_feature 1..20: note = Synthetic oligonucleotide
  source 1..20: mol_type = other RNA
gggtttggaattctagatcg

SEQ ID NO: 719 - RNA, 20 nt, synthetic construct
  misc_feature 1..20: note = Synthetic oligonucleotide
  source 1..20: mol_type = other RNA
ggtttggaattctagatcgt

SEQ ID NO: 720 - RNA, 20 nt, synthetic construct
  misc_feature 1..20: note = Synthetic oligonucleotide
  source 1..20: mol_type = other RNA
gtttggaattctagatcgta

SEQ ID NO: 721 - RNA, 20 nt, synthetic construct
  misc_feature 1..20: note = Synthetic oligonucleotide
  source 1..20: mol_type = other RNA
tcgtatttgaagtgttggtg

SEQ ID NO: 722 - RNA, 20 nt, synthetic construct
  misc_feature 1..20: note = Synthetic oligonucleotide
  source 1..20: mol_type = other RNA
cgtatttgaagtgttggtgc

SEQ ID NO: 723 - RNA, 20 nt, synthetic construct
  misc_feature 1..20: note = Synthetic oligonucleotide
  source 1..20: mol_type = other RNA
gtatttgaagtgttggtgcc

SEQ ID NO: 724 - RNA, 20 nt, synthetic construct
  misc_feature 1..20: note = Synthetic oligonucleotide
  source 1..20: mol_type = other RNA
tatttgaagtgttggtgcca

SEQ ID NO: 725 - RNA, 20 nt, synthetic construct
  misc_feature 1..20: note = Synthetic oligonucleotide
  source 1..20: mol_type = other RNA
atttgaagtgttggtgccac

SEQ ID NO: 726 - RNA, 20 nt, synthetic construct
  misc_feature 1..20: note = Synthetic oligonucleotide
  source 1..20: mol_type = other RNA
tttgaagtgttggtgccaca

SEQ ID NO: 727 - RNA, 20 nt, synthetic construct
  misc_feature 1..20: note = Synthetic oligonucleotide
  source 1..20: mol_type = other RNA
ttgaagtgttggtgccacac

SEQ ID NO: 728 - RNA, 20 nt, synthetic construct
  misc_feature 1..20: note = Synthetic oligonucleotide
  source 1..20: mol_type = other RNA
caccttaacacctgcacgct

SEQ ID NO: 729 - RNA, 20 nt, synthetic construct
  misc_feature 1..20: note = Synthetic oligonucleotide
  source 1..20: mol_type = other RNA
accttaacacctgcacgctg

SEQ ID NO: 730 - RNA, 20 nt, synthetic construct
  misc_feature 1..20: note = Synthetic oligonucleotide
  source 1..20: mol_type = other RNA
ccttaacacctgcacgctgg

SEQ ID NO: 731 - RNA, 20 nt, synthetic construct
  misc_feature 1..20: note = Synthetic oligonucleotide
  source 1..20: mol_type = other RNA
cttaacacctgcacgctggc

SEQ ID NO: 732 - RNA, 20 nt, synthetic construct
  misc_feature 1..20: note = Synthetic oligonucleotide
  source 1..20: mol_type = other RNA
ttaacacctgcacgctggca

SEQ ID NO: 733 - RNA, 20 nt, synthetic construct
  misc_feature 1..20: note = Synthetic oligonucleotide
  source 1..20: mol_type = other RNA
taacacctgcacgctggcaa

SEQ ID NO: 734 - RNA, 20 nt, synthetic construct
  misc_feature 1..20: note = Synthetic oligonucleotide
  source 1..20: mol_type = other RNA
aacacctgcacgctggcaac

SEQ ID NO: 735 - RNA, 20 nt, synthetic construct
  misc_feature 1..20: note = Synthetic oligonucleotide
  source 1..20: mol_type = other RNA
acacctgcacgctggcaaca

SEQ ID NO: 736 - RNA, 20 nt, synthetic construct
  misc_feature 1..20: note = Synthetic oligonucleotide
  source 1..20: mol_type = other RNA
cacctgcacgctggcaacaa

SEQ ID NO: 737 - RNA, 20 nt, synthetic construct
  misc_feature 1..20: note = Synthetic oligonucleotide
  source 1..20: mol_type = other RNA
acctgcacgctggcaacaaa

SEQ ID NO: 738 - RNA, 20 nt, synthetic construct
  misc_feature 1..20: note = Synthetic oligonucleotide
  source 1..20: mol_type = other RNA
cctgcacgctggcaacaaaa

SEQ ID NO: 739 - RNA, 20 nt, synthetic construct
  misc_feature 1..20: note = Synthetic oligonucleotide
  source 1..20: mol_type = other RNA
ctgcacgctggcaacaaaac

SEQ ID NO: 740 - RNA, 20 nt, synthetic construct
  misc_feature 1..20: note = Synthetic oligonucleotide
  source 1..20: mol_type = other RNA
tgcacgctggcaacaaaacc

SEQ ID NO: 741 - RNA, 20 nt, synthetic construct
  misc_feature 1..20: note = Synthetic oligonucleotide
  source 1..20: mol_type = other RNA
gcacgctggcaacaaaaccg

SEQ ID NO: 742 - RNA, 20 nt, synthetic construct
  misc_feature 1..20: note = Synthetic oligonucleotide
  source 1..20: mol_type = other RNA
cacgctggcaacaaaaccgt

SEQ ID NO: 743 - RNA, 20 nt, synthetic construct
  misc_feature 1..20: note = Synthetic oligonucleotide
  source 1..20: mol_type = other RNA
acgctggcaacaaaaccgtc

SEQ ID NO: 744 - RNA, 20 nt, synthetic construct
  misc_feature 1..20: note = Synthetic oligonucleotide
  source 1..20: mol_type = other RNA
cgctggcaacaaaaccgtcc

SEQ ID NO: 745 - RNA, 20 nt, synthetic construct
  misc_feature 1..20: note = Synthetic oligonucleotide
  source 1..20: mol_type = other RNA
gctggcaacaaaaccgtccg

SEQ ID NO: 746 - RNA, 20 nt, synthetic construct
  misc_feature 1..20: note = Synthetic oligonucleotide
  source 1..20: mol_type = other RNA
ctggcaacaaaaccgtccgc

SEQ ID NO: 747 - RNA, 20 nt, synthetic construct
  misc_feature 1..20: note = Synthetic oligonucleotide
  source 1..20: mol_type = other RNA
tggcaacaaaaccgtccgct

SEQ ID NO: 748 - RNA, 20 nt, synthetic construct
  misc_feature 1..20: note = Synthetic oligonucleotide
  source 1..20: mol_type = other RNA
ggcaacaaaaccgtccgctc

SEQ ID NO: 749 - RNA, 20 nt, synthetic construct
  misc_feature 1..20: note = Synthetic oligonucleotide
  source 1..20: mol_type = other RNA
gcaacaaaaccgtccgctct

SEQ ID NO: 750 - RNA, 20 nt, synthetic construct
  misc_feature 1..20: note = Synthetic oligonucleotide
  source 1..20: mol_type = other RNA
caacaaaaccgtccgctctg

SEQ ID NO: 751 - RNA, 20 nt, synthetic construct
  misc_feature 1..20: note = Synthetic oligonucleotide
  source 1..20: mol_type = other RNA
aacaaaaccgtccgctctgc

SEQ ID NO: 752 - RNA, 20 nt, synthetic construct
  misc_feature 1..20: note = Synthetic oligonucleotide
  source 1..20: mol_type = other RNA
acaaaaccgtccgctctgca

SEQ ID NO: 753 - RNA, 20 nt, synthetic construct
  misc_feature 1..20: note = Synthetic oligonucleotide
  source 1..20: mol_type = other RNA
caaaaccgtccgctctgcag

SEQ ID NO: 754 - RNA, 20 nt, synthetic construct
  misc_feature 1..20: note = Synthetic oligonucleotide
  source 1..20: mol_type = other RNA
aaaaccgtccgctctgcagc

SEQ ID NO: 755 - RNA, 20 nt, synthetic construct
  misc_feature 1..20: note = Synthetic oligonucleotide
  source 1..20: mol_type = other RNA
aaaccgtccgctctgcagca

SEQ ID NO: 756 - RNA, 20 nt, synthetic construct
  misc_feature 1..20: note = Synthetic oligonucleotide
  source 1..20: mol_type = other RNA
aaccgtccgctctgcagcac

SEQ ID NO: 757 - RNA, 20 nt, synthetic construct
  misc_feature 1..20: note = Synthetic oligonucleotide
  source 1..20: mol_type = other RNA
accgtccgctctgcagcaca

SEQ ID NO: 758 - RNA, 20 nt, synthetic construct
  misc_feature 1..20: note = Synthetic oligonucleotide
  source 1..20: mol_type = other RNA
ccgtccgctctgcagcacag

SEQ ID NO: 759 - RNA, 20 nt, synthetic construct
  misc_feature 1..20: note = Synthetic oligonucleotide
  source 1..20: mol_type = other RNA
cgtccgctctgcagcacagc

SEQ ID NO: 760 - RNA, 20 nt, synthetic construct
  misc_feature 1..20: note = Synthetic oligonucleotide
  source 1..20: mol_type = other RNA
gtccgctctgcagcacagct

SEQ ID NO: 761 - RNA, 20 nt, synthetic construct
  misc_feature 1..20: note = Synthetic oligonucleotide
  source 1..20: mol_type = other RNA
tccgctctgcagcacagctg

SEQ ID NO: 762 - RNA, 20 nt, synthetic construct
  misc_feature 1..20: note = Synthetic oligonucleotide
  source 1..20: mol_type = other RNA
ccgctctgcagcacagctgg

SEQ ID NO: 763 - RNA, 20 nt, synthetic construct
  misc_feature 1..20: note = Synthetic oligonucleotide
  source 1..20: mol_type = other RNA
cgctctgcagcacagctggg

SEQ ID NO: 764 - RNA, 20 nt, synthetic construct
  misc_feature 1..20: note = Synthetic oligonucleotide
  source 1..20: mol_type = other RNA
ctctgcagcacagctggggt

SEQ ID NO: 765 - RNA, 20 nt, synthetic construct
  misc_feature 1..20: note = Synthetic oligonucleotide
  source 1..20: mol_type = other RNA
tctgcagcacagctggggtc

SEQ ID NO: 766 - RNA, 20 nt, synthetic construct
  misc_feature 1..20: note = Synthetic oligonucleotide
  source 1..20: mol_type = other RNA
ctgcagcacagctggggtca

SEQ ID NO: 767 - RNA, 20 nt, synthetic construct
  misc_feature 1..20: note = Synthetic oligonucleotide
  source 1..20: mol_type = other RNA
tgcagcacagctggggtcac

SEQ ID NO: 768 - RNA, 20 nt, synthetic construct
  misc_feature 1..20: note = Synthetic oligonucleotide
  source 1..20: mol_type = other RNA
gcagcacagctggggtcacc

SEQ ID NO: 769 - RNA, 20 nt, synthetic construct
  misc_feature 1..20: note = Synthetic oligonucleotide
  source 1..20: mol_type = other RNA
cagcacagctggggtcacct

SEQ ID NO: 770 - RNA, 20 nt, synthetic construct
  misc_feature 1..20: note = Synthetic oligonucleotide
  source 1..20: mol_type = other RNA
agcacagctggggtcacctg

SEQ ID NO: 771 - RNA, 20 nt, synthetic construct
  misc_feature 1..20: note = Synthetic oligonucleotide
  source 1..20: mol_type = other RNA
gcacagctggggtcacctga

SEQ ID NO: 772 - RNA, 20 nt, synthetic construct
  misc_feature 1..20: note = Synthetic oligonucleotide
  source 1..20: mol_type = other RNA
cacagctggggtcacctgac

SEQ ID NO: 773 - RNA, 20 nt, synthetic construct
  misc_feature 1..20: note = Synthetic oligonucleotide
  source 1..20: mol_type = other RNA
acagctggggtcacctgacc

SEQ ID NO: 774 - RNA, 20 nt, synthetic construct
  misc_feature 1..20: note = Synthetic oligonucleotide
  source 1..20: mol_type = other RNA
cagctggggtcacctgacct

SEQ ID NO: 775 - RNA, 20 nt, synthetic construct
  misc_feature 1..20: note = Synthetic oligonucleotide
  source 1..20: mol_type = other RNA
agctggggtcacctgacctt

SEQ ID NO: 776 - RNA, 20 nt, synthetic construct
  misc_feature 1..20: note = Synthetic oligonucleotide
  source 1..20: mol_type = other RNA
gctggggtcacctgaccttt

SEQ ID NO: 777 - RNA, 20 nt, synthetic construct
  misc_feature 1..20: note = Synthetic oligonucleotide
  source 1..20: mol_type = other RNA
ctggggtcacctgacctttc

SEQ ID NO: 778 - RNA, 20 nt, synthetic construct
  misc_feature 1..20: note = Synthetic oligonucleotide
  source 1..20: mol_type = other RNA
tggggtcacctgacctttct

SEQ ID NO: 779 - RNA, 20 nt, synthetic construct
  misc_feature 1..20: note = Synthetic oligonucleotide
  source 1..20: mol_type = other RNA
ggggtcacctgacctttctc

SEQ ID NO: 780 - RNA, 20 nt, synthetic construct
  misc_feature 1..20: note = Synthetic oligonucleotide
  source 1..20: mol_type = other RNA
gggtcacctgacctttctcc

SEQ ID NO: 781 - RNA, 20 nt, synthetic construct
  misc_feature 1..20: note = Synthetic oligonucleotide
  source 1..20: mol_type = other RNA
ggtcacctgacctttctcct

SEQ ID NO: 782 - RNA, 20 nt, synthetic construct
  misc_feature 1..20: note = Synthetic oligonucleotide
  source 1..20: mol_type = other RNA
gtcacctgacctttctcctg

SEQ ID NO: 783 - RNA, 20 nt, synthetic construct
  misc_feature 1..20: note = Synthetic oligonucleotide
  source 1..20: mol_type = other RNA
tcacctgacctttctcctgt

SEQ ID NO: 784 - RNA, 20 nt, synthetic construct
  misc_feature 1..20: note = Synthetic oligonucleotide
  source 1..20: mol_type = other RNA
cacctgacctttctcctgtc

SEQ ID NO: 785 - RNA, 20 nt, synthetic construct
  misc_feature 1..20: note = Synthetic oligonucleotide
  source 1..20: mol_type = other RNA
acctgacctttctcctgtcc

SEQ ID NO: 786 - RNA, 20 nt, synthetic construct
  misc_feature 1..20: note = Synthetic oligonucleotide
  source 1..20: mol_type = other RNA
cctgacctttctcctgtccc

SEQ ID NO: 787 - RNA, 20 nt, synthetic construct
  misc_feature 1..20: note = Synthetic oligonucleotide
  source 1..20: mol_type = other RNA
ccacttgagctcagtggctg

SEQ ID NO: 788 - RNA, 20 nt, synthetic construct
  misc_feature 1..20: note = Synthetic oligonucleotide
  source 1..20: mol_type = other RNA
cacttgagctcagtggctgg

SEQ ID NO: 789 - RNA, 20 nt, synthetic construct
  misc_feature 1..20: note = Synthetic oligonucleotide
  source 1..20: mol_type = other RNA
acttgagctcagtggctggg

SEQ ID NO: 790 - RNA, 20 nt, synthetic construct
  misc_feature 1..20: note = Synthetic oligonucleotide
  source 1..20: mol_type = other RNA
cttgagctcagtggctgggc

SEQ ID NO: 791 - RNA, 20 nt, synthetic construct
  misc_feature 1..20: note = Synthetic oligonucleotide
  source 1..20: mol_type = other RNA
ttgagctcagtggctgggca

SEQ ID NO: 792 - RNA, 20 nt, synthetic construct
  misc_feature 1..20: note = Synthetic oligonucleotide
  source 1..20: mol_type = other RNA
tgagctcagtggctgggcag

SEQ ID NO: 793 - RNA, 20 nt, synthetic construct
  misc_feature 1..20: note = Synthetic oligonucleotide
  source 1..20: mol_type = other RNA
gagctcagtggctgggcagc

SEQ ID NO: 794 - RNA, 20 nt, synthetic construct
  misc_feature 1..20: note = Synthetic oligonucleotide
  source 1..20: mol_type = other RNA
agctcagtggctgggcagca

SEQ ID NO: 795 - RNA, 20 nt, synthetic construct
  misc_feature 1..20: note = Synthetic oligonucleotide
  source 1..20: mol_type = other RNA
gctcagtggctgggcagcag

SEQ ID NO: 796 - RNA, 20 nt, synthetic construct
  misc_feature 1..20: note = Synthetic oligonucleotide
  source 1..20: mol_type = other RNA
ctcagtggctgggcagcagg

SEQ ID NO: 797 - RNA, 20 nt, synthetic construct
  misc_feature 1..20: note = Synthetic oligonucleotide
  source 1..20: mol_type = other RNA
agtggctgggcagcagggga

SEQ ID NO: 798 - RNA, 20 nt, synthetic construct
  misc_feature 1..20: note = Synthetic oligonucleotide
  source 1..20: mol_type = other RNA
gtggctgggcagcaggggat

SEQ ID NO: 799 - RNA, 20 nt, synthetic construct
  misc_feature 1..20: note = Synthetic oligonucleotide
  source 1..20: mol_type = other RNA
tggctgggcagcaggggatg

SEQ ID NO: 800 - RNA, 20 nt, synthetic construct
  misc_feature 1..20: note = Synthetic oligonucleotide
  source 1..20: mol_type = other RNA
gctgggcagcaggggatgca

SEQ ID NO: 801 - RNA, 20 nt, synthetic construct
  misc_feature 1..20: note = Synthetic oligonucleotide
  source 1..20: mol_type = other RNA
ctgggcagcaggggatgcat

SEQ ID NO: 802 - RNA, 20 nt, synthetic construct
  misc_feature 1..20: note = Synthetic oligonucleotide
  source 1..20: mol_type = other RNA
tgggcagcaggggatgcatg

SEQ ID NO: 803 - RNA, 20 nt, synthetic construct
  misc_feature 1..20: note = Synthetic oligonucleotide
  source 1..20: mol_type = other RNA
gggcagcaggggatgcatgg

SEQ ID NO: 804 - RNA, 20 nt, synthetic construct
  misc_feature 1..20: note = Synthetic oligonucleotide
  source 1..20: mol_type = other RNA
ggcagcaggggatgcatggc

SEQ ID NO: 805 - RNA, 20 nt, synthetic construct
  misc_feature 1..20: note = Synthetic oligonucleotide
  source 1..20: mol_type = other RNA
cagcaggggatgcatggcca

SEQ ID NO: 806 - RNA, 20 nt, synthetic construct
  misc_feature 1..20: note = Synthetic oligonucleotide
  source 1..20: mol_type = other RNA
agcaggggatgcatggccac

SEQ ID NO: 807 - RNA, 20 nt, synthetic construct
  misc_feature 1..20: note = Synthetic oligonucleotide
  source 1..20: mol_type = other RNA
gcaggggatgcatggccact

SEQ ID NO: 808 - RNA, 20 nt, synthetic construct
  misc_feature 1..20: note = Synthetic oligonucleotide
  source 1..20: mol_type = other RNA
caggggatgcatggccactg

SEQ ID NO: 809 - RNA, 20 nt, synthetic construct
  misc_feature 1..20: note = Synthetic oligonucleotide
  source 1..20: mol_type = other RNA
aggggatgcatggccactgg

SEQ ID NO: 810 - RNA, 20 nt, synthetic construct
  misc_feature 1..20: note = Synthetic oligonucleotide
  source 1..20: mol_type = other RNA
ggggatgcatggccactggc

SEQ ID NO: 811 - RNA, 20 nt, synthetic construct
  misc_feature 1..20: note = Synthetic oligonucleotide
  source 1..20: mol_type = other RNA
gggatgcatggccactggcc

SEQ ID NO: 812 - RNA, 20 nt, synthetic construct
  misc_feature 1..20: note = Synthetic oligonucleotide
  source 1..20: mol_type = other RNA
gcatggccactggccggcca

SEQ ID NO: 813 - RNA, 20 nt, synthetic construct
  misc_feature 1..20: note = Synthetic oligonucleotide
  source 1..20: mol_type = other RNA
gccaggtgcagctctcagct

SEQ ID NO: 814 - RNA, 20 nt, synthetic construct
  misc_feature 1..20: note = Synthetic oligonucleotide
  source 1..20: mol_type = other RNA
ccaggtgcagctctcagctg

SEQ ID NO: 815 - RNA, 20 nt, synthetic construct
  misc_feature 1..20: note = Synthetic oligonucleotide
  source 1..20: mol_type = other RNA
caggtgcagctctcagctgg

SEQ ID NO: 816 - RNA, 20 nt, synthetic construct
  misc_feature 1..20: note = Synthetic oligonucleotide
  source 1..20: mol_type = other RNA
aggtgcagctctcagctggg

SEQ ID NO: 817 - RNA, 20 nt, synthetic construct
  misc_feature 1..20: note = Synthetic oligonucleotide
  source 1..20: mol_type = other RNA
ggtgcagctctcagctgggg

SEQ ID NO: 818 - RNA, 20 nt, synthetic construct
  misc_feature 1..20: note = Synthetic oligonucleotide
  source 1..20: mol_type = other RNA
gtgcagctctcagctggggt

SEQ ID NO: 819 - RNA, 20 nt, synthetic construct
  misc_feature 1..20: note = Synthetic oligonucleotide
  source 1..20: mol_type = other RNA
tgcagctctcagctggggtg

SEQ ID NO: 820 - RNA, 20 nt, synthetic construct
  misc_feature 1..20: note = Synthetic oligonucleotide
  source 1..20: mol_type = other RNA
gcagctctcagctggggtgt

SEQ ID NO: 821 - RNA, 20 nt, synthetic construct
  misc_feature 1..20: note = Synthetic oligonucleotide
  source 1..20: mol_type = other RNA
cagctctcagctggggtgtt

SEQ ID NO: 822 - RNA, 20 nt, synthetic construct
  misc_feature 1..20: note = Synthetic oligonucleotide
  source 1..20: mol_type = other RNA
agctctcagctggggtgttc

SEQ ID NO: 823 - RNA, 20 nt, synthetic construct
  misc_feature 1..20: note = Synthetic oligonucleotide
  source 1..20: mol_type = other RNA
gctctcagctggggtgttca

SEQ ID NO: 824 - RNA, 20 nt, synthetic construct
  misc_feature 1..20: note = Synthetic oligonucleotide
  source 1..20: mol_type = other RNA
ctctcagctggggtgttcag

SEQ ID NO: 825 - RNA, 20 nt, synthetic construct
  misc_feature 1..20: note = Synthetic oligonucleotide
  source 1..20: mol_type = other RNA
tctcagctggggtgttcaga

SEQ ID NO: 826 - RNA, 20 nt, synthetic construct
  misc_feature 1..20: note = Synthetic oligonucleotide
  source 1..20: mol_type = other RNA
ctcagctggggtgttcagag

SEQ ID NO: 827 - RNA, 20 nt, synthetic construct
  misc_feature 1..20: note = Synthetic oligonucleotide
  source 1..20: mol_type = other RNA
tcagctggggtgttcagagg

SEQ ID NO: 828 - RNA, 20 nt, synthetic construct
  misc_feature 1..20: note = Synthetic oligonucleotide
  source 1..20: mol_type = other RNA
cagctggggtgttcagagga

SEQ ID NO: 829 - RNA, 20 nt, synthetic construct
  misc_feature 1..20: note = Synthetic oligonucleotide
  source 1..20: mol_type = other RNA
agctggggtgttcagaggac

SEQ ID NO: 830 - RNA, 20 nt, synthetic construct
  misc_feature 1..20: note = Synthetic oligonucleotide
  source 1..20: mol_type = other RNA
gctggggtgttcagaggacg

SEQ ID NO: 831 - RNA, 20 nt, synthetic construct
  misc_feature 1..20: note = Synthetic oligonucleotide
  source 1..20: mol_type = other RNA
ctggggtgttcagaggacgc

SEQ ID NO: 832 - RNA, 20 nt, synthetic construct
  misc_feature 1..20: note = Synthetic oligonucleotide
  source 1..20: mol_type = other RNA
tggggtgttcagaggacgcc

SEQ ID NO: 833 - RNA, 20 nt, synthetic construct
  misc_feature 1..20: note = Synthetic oligonucleotide
  source 1..20: mol_type = other RNA
ggggtgttcagaggacgcct

SEQ ID NO: 834 - RNA, 20 nt, synthetic construct
  misc_feature 1..20: note = Synthetic oligonucleotide
  source 1..20: mol_type = other RNA
gggtgttcagaggacgcctg

SEQ ID NO: 835 - RNA, 20 nt, synthetic construct
  misc_feature 1..20: note = Synthetic oligonucleotide
  source 1..20: mol_type = other RNA
ggtgttcagaggacgcctgt

SEQ ID NO: 836 - RNA, 20 nt, synthetic construct
  misc_feature 1..20: note = Synthetic oligonucleotide
  source 1..20: mol_type = other RNA
gtgttcagaggacgcctgtg

SEQ ID NO: 837 - RNA, 20 nt, synthetic construct
  misc_feature 1..20: note = Synthetic oligonucleotide
  source 1..20: mol_type = other RNA
tgttcagaggacgcctgtgt

SEQ ID NO: 838 - RNA, 20 nt, synthetic construct
  misc_feature 1..20: note = Synthetic oligonucleotide
  source 1..20: mol_type = other RNA
gttcagaggacgcctgtgtc

SEQ ID NO: 839 - RNA, 20 nt, synthetic construct
  misc_feature 1..20: note = Synthetic oligonucleotide
  source 1..20: mol_type = other RNA
ttcagaggacgcctgtgtcc

SEQ ID NO: 840 - RNA, 20 nt, synthetic construct
  misc_feature 1..20: note = Synthetic oligonucleotide
  source 1..20: mol_type = other RNA
tcagaggacgcctgtgtcct

SEQ ID NO: 841 - RNA, 20 nt, synthetic construct
  misc_feature 1..20: note = Synthetic oligonucleotide
  source 1..20: mol_type = other RNA
cagaggacgcctgtgtcctc

SEQ ID NO: 842 - RNA, 20 nt, synthetic construct
  misc_feature 1..20: note = Synthetic oligonucleotide
  source 1..20: mol_type = other RNA
agaggacgcctgtgtcctcc

SEQ ID NO: 843 - RNA, 20 nt, synthetic construct
  misc_feature 1..20: note = Synthetic oligonucleotide
  source 1..20: mol_type = other RNA
gaggacgcctgtgtcctccc

SEQ ID NO: 844 - RNA, 20 nt, synthetic construct
  misc_feature 1..20: note = Synthetic oligonucleotide
  source 1..20: mol_type = other RNA
aggacgcctgtgtcctcccc

SEQ ID NO: 845 - RNA, 20 nt, synthetic construct
  misc_feature 1..20: note = Synthetic oligonucleotide
  source 1..20: mol_type = other RNA
ggacgcctgtgtcctcccct

SEQ ID NO: 846 - RNA, 20 nt, synthetic construct
  misc_feature 1..20: note = Synthetic oligonucleotide
  source 1..20: mol_type = other RNA
gacgcctgtgtcctcccctc

SEQ ID NO: 847 - RNA, 20 nt, synthetic construct
  misc_feature 1..20: note = Synthetic oligonucleotide
  source 1..20: mol_type = other RNA
ctgtcacccttggaggcaga

SEQ ID NO: 848 - RNA, 20 nt, synthetic construct
  misc_feature 1..20: note = Synthetic oligonucleotide
  source 1..20: mol_type = other RNA
tgtcacccttggaggcagag

SEQ ID NO: 849 - RNA, 20 nt, synthetic construct
  misc_feature 1..20: note = Synthetic oligonucleotide
  source 1..20: mol_type = other RNA
gtcacccttggaggcagaga

SEQ ID NO: 850 - RNA, 20 nt, synthetic construct
  misc_feature 1..20: note = Synthetic oligonucleotide
  source 1..20: mol_type = other RNA
tcacccttggaggcagagaa

SEQ ID NO: 851 - RNA, 20 nt, synthetic construct
  misc_feature 1..20: note = Synthetic oligonucleotide
  source 1..20: mol_type = other RNA
cacccttggaggcagagaac

SEQ ID NO: 852 - RNA, 20 nt, synthetic construct
  misc_feature 1..20: note = Synthetic oligonucleotide
  source 1..20: mol_type = other RNA
acccttggaggcagagaact

SEQ ID NO: 853 - RNA, 20 nt, synthetic construct
  misc_feature 1..20: note = Synthetic oligonucleotide
  source 1..20: mol_type = other RNA
cccttggaggcagagaactt

SEQ ID NO: 854 - RNA, 20 nt, synthetic construct
  misc_feature 1..20: note = Synthetic oligonucleotide
  source 1..20: mol_type = other RNA
ccttggaggcagagaacttt

SEQ ID NO: 855 - RNA, 20 nt, synthetic construct
  misc_feature 1..20: note = Synthetic oligonucleotide
  source 1..20: mol_type = other RNA
cttggaggcagagaactttg

SEQ ID NO: 856 - RNA, 20 nt, synthetic construct
  misc_feature 1..20: note = Synthetic oligonucleotide
  source 1..20: mol_type = other RNA
ttggaggcagagaactttgc

SEQ ID NO: 857 - RNA, 20 nt, synthetic construct
  misc_feature 1..20: note = Synthetic oligonucleotide
  source 1..20: mol_type = other RNA
tggaggcagagaactttgcc

SEQ ID NO: 858 - RNA, 20 nt, synthetic construct
  misc_feature 1..20: note = Synthetic oligonucleotide
  source 1..20: mol_type = other RNA
ggaggcagagaactttgccc

SEQ ID NO: 859 - RNA, 22 nt, synthetic construct
  misc_feature 1..22: note = Synthetic oligonucleotide
  source 1..22: mol_type = other RNA
ctccagcggtccacatcttacg

SEQ ID NO: 860 - RNA, 22 nt, synthetic construct
  misc_feature 1..22: note = Synthetic oligonucleotide
  source 1..22: mol_type = other RNA
tctccagcggtccacatcttac

SEQ ID NO: 861 - RNA, 22 nt, synthetic construct
  misc_feature 1..22: note = Synthetic oligonucleotide
  source 1..22: mol_type = other RNA
ttctccagcggtccacatctta

SEQ ID NO: 862 - RNA, 22 nt, synthetic construct
  misc_feature 1..22: note = Synthetic oligonucleotide
  source 1..22: mol_type = other RNA
attctccagcggtccacatctt

SEQ ID NO: 863 - RNA, 22 nt, synthetic construct
  misc_feature 1..22: note = Synthetic oligonucleotide
  source 1..22: mol_type = other RNA
cattctccagcggtccacatct

SEQ ID NO: 864 - RNA, 22 nt, synthetic construct
  misc_feature 1..22: note = Synthetic oligonucleotide
  source 1..22: mol_type = other RNA
ccattctccagcggtccacatc

SEQ ID NO: 865 - RNA, 22 nt, synthetic construct
  misc_feature 1..22: note = Synthetic oligonucleotide
  source 1..22: mol_type = other RNA
cccattctccagcggtccacat

SEQ ID NO: 866 - RNA, 22 nt, synthetic construct
  misc_feature 1..22: note = Synthetic oligonucleotide
  source 1..22: mol_type = other RNA
ccccattctccagcggtccaca

SEQ ID NO: 867 - RNA, 22 nt, synthetic construct
  misc_feature 1..22: note = Synthetic oligonucleotide
  source 1..22: mol_type = other RNA
ttttgactgcaggcagcacccc

SEQ ID NO: 868 - RNA, 22 nt, synthetic construct
  misc_feature 1..22: note = Synthetic oligonucleotide
  source 1..22: mol_type = other RNA
gttttgactgcaggcagcaccc

SEQ ID NO: 869 - RNA, 22 nt, synthetic construct
  misc_feature 1..22: note = Synthetic oligonucleotide
  source 1..22: mol_type = other RNA
cgttttgactgcaggcagcacc

SEQ ID NO: 870 - RNA, 22 nt, synthetic construct
  misc_feature 1..22: note = Synthetic oligonucleotide
  source 1..22: mol_type = other RNA
ccgttttgactgcaggcagcac

SEQ ID NO: 871 - RNA, 22 nt, synthetic construct
  misc_feature 1..22: note = Synthetic oligonucleotide
  source 1..22: mol_type = other RNA
tccgttttgactgcaggcagca

SEQ ID NO: 872 - RNA, 22 nt, synthetic construct
  misc_feature 1..22: note = Synthetic oligonucleotide
  source 1..22: mol_type = other RNA
ctccgttttgactgcaggcagc

SEQ ID NO: 873 - RNA, 22 nt, synthetic construct
  misc_feature 1..22: note = Synthetic oligonucleotide
  source 1..22: mol_type = other RNA
actccgttttgactgcaggcag

SEQ ID NO: 874 - RNA, 22 nt, synthetic construct
  misc_feature 1..22: note = Synthetic oligonucleotide
  source 1..22: mol_type = other RNA
cactccgttttgactgcaggca

SEQ ID NO: 875 - RNA, 22 nt, synthetic construct
  misc_feature 1..22: note = Synthetic oligonucleotide
  source 1..22: mol_type = other RNA
ccactccgttttgactgcaggc

SEQ ID NO: 876 - RNA, 22 nt, synthetic construct
  misc_feature 1..22: note = Synthetic oligonucleotide
  source 1..22: mol_type = other RNA
cccactccgttttgactgcagg

SEQ ID NO: 877 - RNA, 22 nt, synthetic construct
  misc_feature 1..22: note = Synthetic oligonucleotide
  source 1..22: mol_type = other RNA
ccccactccgttttgactgcag

SEQ ID NO: 878 - RNA, 22 nt, synthetic construct
  misc_feature 1..22: note = Synthetic oligonucleotide
  source 1..22: mol_type = other RNA
ttctggccctgagctgggcacc

SEQ ID NO: 879 - RNA, 22 nt, synthetic construct
  misc_feature 1..22: note = Synthetic oligonucleotide
  source 1..22: mol_type = other RNA
attctggccctgagctgggcac

SEQ ID NO: 880 - RNA, 22 nt, synthetic construct
  misc_feature 1..22: note = Synthetic oligonucleotide
  source 1..22: mol_type = other RNA
cattctggccctgagctgggca

SEQ ID NO: 881 - RNA, 22 nt, synthetic construct
  misc_feature 1..22: note = Synthetic oligonucleotide
  source 1..22: mol_type = other RNA
tcattctggccctgagctgggc

SEQ ID NO: 882 - RNA, 22 nt, synthetic construct
  misc_feature 1..22: note = Synthetic oligonucleotide
  source 1..22: mol_type = other RNA
atcattctggccctgagctggg

SEQ ID NO: 883 - RNA, 22 nt, synthetic construct
  misc_feature 1..22: note = Synthetic oligonucleotide
  source 1..22: mol_type = other RNA
gatcattctggccctgagctgg

SEQ ID NO: 884 - RNA, 22 nt, synthetic construct
  misc_feature 1..22: note = Synthetic oligonucleotide
  source 1..22: mol_type = other RNA
ggatcattctggccctgagctg

SEQ ID NO: 885 - RNA, 22 nt, synthetic construct
  misc_feature 1..22: note = Synthetic oligonucleotide
  source 1..22: mol_type = other RNA
aggatcattctggccctgagct

SEQ ID NO: 886 - RNA, 22 nt, synthetic construct
  misc_feature 1..22: note = Synthetic oligonucleotide
  source 1..22: mol_type = other RNA
taggatcattctggccctgagc

SEQ ID NO: 887 - RNA, 22 nt, synthetic construct
  misc_feature 1..22: note = Synthetic oligonucleotide
  source 1..22: mol_type = other RNA
ataggatcattctggccctgag

SEQ ID NO: 888 - RNA, 22 nt, synthetic construct
  misc_feature 1..22: note = Synthetic oligonucleotide
  source 1..22: mol_type = other RNA
aataggatcattctggccctga

SEQ ID NO: 889 - RNA, 22 nt, synthetic construct
  misc_feature 1..22: note = Synthetic oligonucleotide
  source 1..22: mol_type = other RNA
gaataggatcattctggccctg

SEQ ID NO: 890 - RNA, 22 nt, synthetic construct
  misc_feature 1..22: note = Synthetic oligonucleotide
  source 1..22: mol_type = other RNA
ggaataggatcattctggccct

SEQ ID NO: 891 - RNA, 22 nt, synthetic construct
  misc_feature 1..22: note = Synthetic oligonucleotide
  source 1..22: mol_type = other RNA
gggaataggatcattctggccc

SEQ ID NO: 892 - RNA, 22 nt, synthetic construct
  misc_feature 1..22: note = Synthetic oligonucleotide
  source 1..22: mol_type = other RNA
cgggaataggatcattctggcc

SEQ ID NO: 893 - RNA, 22 nt, synthetic construct
  misc_feature 1..22: note = Synthetic oligonucleotide
  source 1..22: mol_type = other RNA
ccgggaataggatcattctggc

SEQ ID NO: 894 - RNA, 22 nt, synthetic construct
  misc_feature 1..22: note = Synthetic oligonucleotide
  source 1..22: mol_type = other RNA
gccgggaataggatcattctgg

SEQ ID NO: 895 - RNA, 22 nt, synthetic construct
  misc_feature 1..22: note = Synthetic oligonucleotide
  source 1..22: mol_type = other RNA
tgccgggaataggatcattctg

SEQ ID NO: 896 - RNA, 22 nt, synthetic construct
  misc_feature 1..22: note = Synthetic oligonucleotide
  source 1..22: mol_type = other RNA
gtgccgggaataggatcattct

SEQ ID NO: 897 - RNA, 22 nt, synthetic construct
  misc_feature 1..22: note = Synthetic oligonucleotide
  source 1..22: mol_type = other RNA
agtgccgggaataggatcattc

SEQ ID NO: 898 - RNA, 22 nt, synthetic construct
  misc_feature 1..22: note = Synthetic oligonucleotide
  source 1..22: mol_type = other RNA
aagtgccgggaataggatcatt

SEQ ID NO: 899 - RNA, 22 nt, synthetic construct
  misc_feature 1..22: note = Synthetic oligonucleotide
  source 1..22: mol_type = other RNA
gaagtgccgggaataggatcat

SEQ ID NO: 900 - RNA, 22 nt, synthetic construct
  misc_feature 1..22: note = Synthetic oligonucleotide
  source 1..22: mol_type = other RNA
agaagtgccgggaataggatca

SEQ ID NO: 901 - RNA, 22 nt, synthetic construct
  misc_feature 1..22: note = Synthetic oligonucleotide
  source 1..22: mol_type = other RNA
gagaagtgccgggaataggatc

SEQ ID NO: 902 - RNA, 22 nt, synthetic construct
  misc_feature 1..22: note = Synthetic oligonucleotide
  source 1..22: mol_type = other RNA
tgagaagtgccgggaataggat

SEQ ID NO: 903 - RNA, 22 nt, synthetic construct
  misc_feature 1..22: note = Synthetic oligonucleotide
  source 1..22: mol_type = other RNA
ctgagaagtgccgggaatagga

SEQ ID NO: 904 - RNA, 22 nt, synthetic construct
  misc_feature 1..22: note = Synthetic oligonucleotide
  source 1..22: mol_type = other RNA
actgagaagtgccgggaatagg

SEQ ID NO: 905 - RNA, 22 nt, synthetic construct
  misc_feature 1..22: note = Synthetic oligonucleotide
  source 1..22: mol_type = other RNA
cactgagaagtgccgggaatag

SEQ ID NO: 906 - RNA, 22 nt, synthetic construct
  misc_feature 1..22: note = Synthetic oligonucleotide
  source 1..22: mol_type = other RNA
tcactgagaagtgccgggaata

SEQ ID NO: 907 - RNA, 22 nt, synthetic construct
  misc_feature 1..22: note = Synthetic oligonucleotide
  source 1..22: mol_type = other RNA
ctcactgagaagtgccgggaat

SEQ ID NO: 908 - RNA, 22 nt, synthetic construct
  misc_feature 1..22: note = Synthetic oligonucleotide
  source 1..22: mol_type = other RNA
cctcactgagaagtgccgggaa

SEQ ID NO: 909 - RNA, 22 nt, synthetic construct
  misc_feature 1..22: note = Synthetic oligonucleotide
  source 1..22: mol_type = other RNA
gcctcactgagaagtgccggga

SEQ ID NO: 910 - RNA, 22 nt, synthetic construct
  misc_feature 1..22: note = Synthetic oligonucleotide
  source 1..22: mol_type = other RNA
agcctcactgagaagtgccggg

SEQ ID NO: 911 - RNA, 22 nt, synthetic construct
  misc_feature 1..22: note = Synthetic oligonucleotide
  source 1..22: mol_type = other RNA
gagcctcactgagaagtgccgg

SEQ ID NO: 912 - RNA, 22 nt, synthetic construct
  misc_feature 1..22: note = Synthetic oligonucleotide
  source 1..22: mol_type = other RNA
agagcctcactgagaagtgccg

SEQ ID NO: 913 - RNA, 22 nt, synthetic construct
  misc_feature 1..22: note = Synthetic oligonucleotide
  source 1..22: mol_type = other RNA
cagagcctcactgagaagtgcc

SEQ ID NO: 914 - RNA, 22 nt, synthetic construct
  misc_feature 1..22: note = Synthetic oligonucleotide
  source 1..22: mol_type = other RNA
acagagcctcactgagaagtgc

SEQ ID NO: 915 - RNA, 22 nt, synthetic construct
  misc_feature 1..22: note = Synthetic oligonucleotide
  source 1..22: mol_type = other RNA
cacagagcctcactgagaagtg

SEQ ID NO: 916 - RNA, 22 nt, synthetic construct
  misc_feature 1..22: note = Synthetic oligonucleotide
  source 1..22: mol_type = other RNA
ccacagagcctcactgagaagt

SEQ ID NO: 917 - RNA, 22 nt, synthetic construct
  misc_feature 1..22: note = Synthetic oligonucleotide
  source 1..22: mol_type = other RNA
gccacagagcctcactgagaag

SEQ ID NO: 918 - RNA, 22 nt, synthetic construct
  misc_feature 1..22: note = Synthetic oligonucleotide
  source 1..22: mol_type = other RNA
agccacagagcctcactgagaa

SEQ ID NO: 919 - RNA, 22 nt, synthetic construct
  misc_feature 1..22: note = Synthetic oligonucleotide
  source 1..22: mol_type = other RNA
gagccacagagcctcactgaga

SEQ ID NO: 920 - RNA, 22 nt, synthetic construct
  misc_feature 1..22: note = Synthetic oligonucleotide
  source 1..22: mol_type = other RNA
tgagccacagagcctcactgag

SEQ ID NO: 921 - RNA, 22 nt, synthetic construct
  misc_feature 1..22: note = Synthetic oligonucleotide
  source 1..22: mol_type = other RNA
gtgagccacagagcctcactga

SEQ ID NO: 922 - RNA, 22 nt, synthetic construct
  misc_feature 1..22: note = Synthetic oligonucleotide
  source 1..22: mol_type = other RNA
ggtgagccacagagcctcactg

SEQ ID NO: 923 - RNA, 22 nt, synthetic construct
  misc_feature 1..22: note = Synthetic oligonucleotide
  source 1..22: mol_type = other RNA
aggtgagccacagagcctcact

SEQ ID NO: 924 - RNA, 22 nt, synthetic construct
  misc_feature 1..22: note = Synthetic oligonucleotide
  source 1..22: mol_type = other RNA
taggtgagccacagagcctcac

SEQ ID NO: 925 - RNA, 22 nt, synthetic construct
  misc_feature 1..22: note = Synthetic oligonucleotide
  source 1..22: mol_type = other RNA
ttaggtgagccacagagcctca

SEQ ID NO: 926 - RNA, 22 nt, synthetic construct
  misc_feature 1..22: note = Synthetic oligonucleotide
  source 1..22: mol_type = other RNA
cttaggtgagccacagagcctc

SEQ ID NO: 927 - RNA, 22 nt, synthetic construct
  misc_feature 1..22: note = Synthetic oligonucleotide
  source 1..22: mol_type = other RNA
tcttaggtgagccacagagcct

SEQ ID NO: 928 - RNA, 22 nt, synthetic construct
  misc_feature 1..22: note = Synthetic oligonucleotide
  source 1..22: mol_type = other RNA
ttcttaggtgagccacagagcc

SEQ ID NO: 929 - RNA, 22 nt, synthetic construct
  misc_feature 1..22: note = Synthetic oligonucleotide
  source 1..22: mol_type = other RNA
tttcttaggtgagccacagagc

SEQ ID NO: 930 - RNA, 22 nt, synthetic construct
  misc_feature 1..22: note = Synthetic oligonucleotide
  source 1..22: mol_type = other RNA
gtttcttaggtgagccacagag

SEQ ID NO: 931 - RNA, 22 nt, synthetic construct
  misc_feature 1..22: note = Synthetic oligonucleotide
  source 1..22: mol_type = other RNA
ggtttcttaggtgagccacaga

SEQ ID NO: 932 - RNA, 22 nt, synthetic construct
  misc_feature 1..22: note = Synthetic oligonucleotide
  source 1..22: mol_type = other RNA
tggtttcttaggtgagccacag

SEQ ID NO: 933 - RNA, 22 nt, synthetic construct
  misc_feature 1..22: note = Synthetic oligonucleotide
  source 1..22: mol_type = other RNA
ctggtttcttaggtgagccaca

SEQ ID NO: 934 - RNA, 22 nt, synthetic construct
  misc_feature 1..22: note = Synthetic oligonucleotide
  source 1..22: mol_type = other RNA
gctggtttcttaggtgagccac

SEQ ID NO: 935 - RNA, 22 nt, synthetic construct
  misc_feature 1..22: note = Synthetic oligonucleotide
  source 1..22: mol_type = other RNA
ggctggtttcttaggtgagcca

SEQ ID NO: 936 - RNA, 22 nt, synthetic construct
  misc_feature 1..22: note = Synthetic oligonucleotide
  source 1..22: mol_type = other RNA
aggctggtttcttaggtgagcc

SEQ ID NO: 937 - RNA, 22 nt, synthetic construct
  misc_feature 1..22: note = Synthetic oligonucleotide
  source 1..22: mol_type = other RNA
gaggctggtttcttaggtgagc

SEQ ID NO: 938 - RNA, 22 nt, synthetic construct
  misc_feature 1..22: note = Synthetic oligonucleotide
  source 1..22: mol_type = other RNA
ggaggctggtttcttaggtgag

SEQ ID NO: 939 - RNA, 22 nt, synthetic construct
  misc_feature 1..22: note = Synthetic oligonucleotide
  source 1..22: mol_type = other RNA
gggaggctggtttcttaggtga

SEQ ID NO: 940 - RNA, 22 nt, synthetic construct
  misc_feature 1..22: note = Synthetic oligonucleotide
  source 1..22: mol_type = other RNA
agggaggctggtttcttaggtg

SEQ ID NO: 941 - RNA, 22 nt, synthetic construct
  misc_feature 1..22: note = Synthetic oligonucleotide
  source 1..22: mol_type = other RNA
aagggaggctggtttcttaggt

SEQ ID NO: 942 - RNA, 22 nt, synthetic construct
  misc_feature 1..22: note = Synthetic oligonucleotide
  source 1..22: mol_type = other RNA
caagggaggctggtttcttagg

SEQ ID NO: 943 - RNA, 22 nt, synthetic construct
  misc_feature 1..22: note = Synthetic oligonucleotide
  source 1..22: mol_type = other RNA
gcaagggaggctggtttcttag

SEQ ID NO: 944 - RNA, 22 nt, synthetic construct
  misc_feature 1..22: note = Synthetic oligonucleotide
  source 1..22: mol_type = other RNA
tgcaagggaggctggtttctta

SEQ ID NO: 945 - RNA, 22 nt, synthetic construct
  misc_feature 1..22: note = Synthetic oligonucleotide
  source 1..22: mol_type = other RNA
ctgcaagggaggctggtttctt

SEQ ID NO: 946 - RNA, 22 nt, synthetic construct
  misc_feature 1..22: note = Synthetic oligonucleotide
  source 1..22: mol_type = other RNA
cctgcaagggaggctggtttct

SEQ ID NO: 947 - RNA, 22 nt, synthetic construct
  misc_feature 1..22: note = Synthetic oligonucleotide
  source 1..22: mol_type = other RNA
gcctgcaagggaggctggtttc

SEQ ID NO: 948 - RNA, 22 nt, synthetic construct
  misc_feature 1..22: note = Synthetic oligonucleotide
  source 1..22: mol_type = other RNA
tgcctgcaagggaggctggttt

SEQ ID NO: 949 - RNA, 22 nt, synthetic construct
  misc_feature 1..22: note = Synthetic oligonucleotide
  source 1..22: mol_type = other RNA
ttgcctgcaagggaggctggtt

SEQ ID NO: 950 - RNA, 22 nt, synthetic construct
  misc_feature 1..22: note = Synthetic oligonucleotide
  source 1..22: mol_type = other RNA
gttgcctgcaagggaggctggt

SEQ ID NO: 951 - RNA, 22 nt, synthetic construct
  misc_feature 1..22: note = Synthetic oligonucleotide
  source 1..22: mol_type = other RNA
cgttgcctgcaagggaggctgg

SEQ ID NO: 952 - RNA, 22 nt, synthetic construct
  misc_feature 1..22: note = Synthetic oligonucleotide
  source 1..22: mol_type = other RNA
ccgttgcctgcaagggaggctg

SEQ ID NO: 953 - RNA, 22 nt, synthetic construct
  misc_feature 1..22: note = Synthetic oligonucleotide
  source 1..22: mol_type = other RNA
gccgttgcctgcaagggaggct

SEQ ID NO: 954 - RNA, 22 nt, synthetic construct
  misc_feature 1..22: note = Synthetic oligonucleotide
  source 1..22: mol_type = other RNA
aggccgttgcctgcaagggagg

SEQ ID NO: 955 - RNA, 22 nt, synthetic construct
  misc_feature 1..22: note = Synthetic oligonucleotide
  source 1..22: mol_type = other RNA
taggccgttgcctgcaagggag

SEQ ID NO: 956 - RNA, 22 nt, synthetic construct
  misc_feature 1..22: note = Synthetic oligonucleotide
  source 1..22: mol_type = other RNA
ctaggccgttgcctgcaaggga

SEQ ID NO: 957 - RNA, 22 nt, synthetic construct
  misc_feature 1..22: note = Synthetic oligonucleotide
  source 1..22: mol_type = other RNA
gctaggccgttgcctgcaaggg

SEQ ID NO: 958 - RNA, 22 nt, synthetic construct
  misc_feature 1..22: note = Synthetic oligonucleotide
  source 1..22: mol_type = other RNA
agctaggccgttgcctgcaagg

SEQ ID NO: 959 - RNA, 22 nt, synthetic construct
  misc_feature 1..22: note = Synthetic oligonucleotide
  source 1..22: mol_type = other RNA
cagctaggccgttgcctgcaag

SEQ ID NO: 960 - RNA, 22 nt, synthetic construct
  misc_feature 1..22: note = Synthetic oligonucleotide
  source 1..22: mol_type = other RNA
ccagctaggccgttgcctgcaa

SEQ ID NO: 961 - RNA, 22 nt, synthetic construct
  misc_feature 1..22: note = Synthetic oligonucleotide
  source 1..22: mol_type = other RNA
gccagctaggccgttgcctgca

SEQ ID NO: 962 - RNA, 22 nt, synthetic construct
  misc_feature 1..22: note = Synthetic oligonucleotide
  source 1..22: mol_type = other RNA
aggccagctaggccgttgcctg

SEQ ID NO: 963 - RNA, 22 nt, synthetic construct
  misc_feature 1..22: note = Synthetic oligonucleotide
  source 1..22: mol_type = other RNA
caggccagctaggccgttgcct

SEQ ID NO: 964 - RNA, 22 nt, synthetic construct
  misc_feature 1..22: note = Synthetic oligonucleotide
  source 1..22: mol_type = other RNA
accaggccagctaggccgttgc

SEQ ID NO: 965 - RNA, 22 nt, synthetic construct
  misc_feature 1..22: note = Synthetic oligonucleotide
  source 1..22: mol_type = other RNA
gaccaggccagctaggccgttg

SEQ ID NO: 966 - RNA, 22 nt, synthetic construct
  misc_feature 1..22: note = Synthetic oligonucleotide
  source 1..22: mol_type = other RNA
agaccaggccagctaggccgtt

SEQ ID NO: 967 - RNA, 22 nt, synthetic construct
  misc_feature 1..22: note = Synthetic oligonucleotide
  source 1..22: mol_type = other RNA
cagaccaggccagctaggccgt

SEQ ID NO: 968 - RNA, 22 nt, synthetic construct
  misc_feature 1..22: note = Synthetic oligonucleotide
  source 1..22: mol_type = other RNA
tccagaccaggccagctaggcc

SEQ ID NO: 969 - RNA, 22 nt, synthetic construct
  misc_feature 1..22: note = Synthetic oligonucleotide
  source 1..22: mol_type = other RNA
ctccagaccaggccagctaggc

SEQ ID NO: 970 - RNA, 22 nt, synthetic construct
  misc_feature 1..22: note = Synthetic oligonucleotide
  source 1..22: mol_type = other RNA
cctccagaccaggccagctagg

SEQ ID NO: 971 - RNA, 22 nt, synthetic construct
  misc_feature 1..22: note = Synthetic oligonucleotide
  source 1..22: mol_type = other RNA
gcctccagaccaggccagctag

SEQ ID NO: 972 - RNA, 22 nt, synthetic construct
  misc_feature 1..22: note = Synthetic oligonucleotide
  source 1..22: mol_type = other RNA
agcctccagaccaggccagcta

SEQ ID NO: 973 - RNA, 22 nt, synthetic construct
  misc_feature 1..22: note = Synthetic oligonucleotide
  source 1..22: mol_type = other RNA
gagcctccagaccaggccagct

SEQ ID NO: 974 - RNA, 22 nt, synthetic construct
  misc_feature 1..22: note = Synthetic oligonucleotide
  source 1..22: mol_type = other RNA
agagcctccagaccaggccagc

SEQ ID NO: 975 - RNA, 22 nt, synthetic construct
  misc_feature 1..22: note = Synthetic oligonucleotide
  source 1..22: mol_type = other RNA
gagagcctccagaccaggccag

SEQ ID NO: 976 - RNA, 22 nt, synthetic construct
  misc_feature 1..22: note = Synthetic oligonucleotide
  source 1..22: mol_type = other RNA
gtatcttgggtgtggatgtaaa

SEQ ID NO: 977 - RNA, 22 nt, synthetic construct
  misc_feature 1..22: note = Synthetic oligonucleotide
  source 1..22: mol_type = other RNA
tcatgcgagtcaaatctcaaga

SEQ ID NO: 978 - RNA, 22 nt, synthetic construct
  misc_feature 1..22: note = Synthetic oligonucleotide
  source 1..22: mol_type = other RNA
atcatgcgagtcaaatctcaag

SEQ ID NO: 979 - RNA, 22 nt, synthetic construct
  misc_feature 1..22: note = Synthetic oligonucleotide
  source 1..22: mol_type = other RNA
caatcatgcgagtcaaatctca

SEQ ID NO: 980 - RNA, 22 nt, synthetic construct
  misc_feature 1..22: note = Synthetic oligonucleotide
  source 1..22: mol_type = other RNA
gcaatcatgcgagtcaaatctc

SEQ ID NO: 981 - RNA, 22 nt, synthetic construct
  misc_feature 1..22: note = Synthetic oligonucleotide
  source 1..22: mol_type = other RNA
agcaatcatgcgagtcaaatct

SEQ ID NO: 982 - RNA, 22 nt, synthetic construct
  misc_feature 1..22: note = Synthetic oligonucleotide
  source 1..22: mol_type = other RNA
tagcaatcatgcgagtcaaatc

SEQ ID NO: 983 - RNA, 22 nt, synthetic construct
  misc_feature 1..22: note = Synthetic oligonucleotide
  source 1..22: mol_type = other RNA
catagcaatcatgcgagtcaaa

SEQ ID NO: 984 - RNA, 22 nt, synthetic construct
  misc_feature 1..22: note = Synthetic oligonucleotide
  source 1..22: mol_type = other RNA
ccatagcaatcatgcgagtcaa

SEQ ID NO: 985 - RNA, 22 nt, synthetic construct
  misc_feature 1..22: note = Synthetic oligonucleotide
  source 1..22: mol_type = other RNA
cccatagcaatcatgcgagtca

SEQ ID NO: 986 - RNA, 22 nt, synthetic construct
  misc_feature 1..22: note = Synthetic oligonucleotide
  source 1..22: mol_type = other RNA
tcccatagcaatcatgcgagtc

SEQ ID NO: 987 - RNA, 22 nt, synthetic construct
  misc_feature 1..22: note = Synthetic oligonucleotide
  source 1..22: mol_type = other RNA
gtcccatagcaatcatgcgagt

SEQ ID NO: 988 - RNA, 22 nt, synthetic construct
  misc_feature 1..22: note = Synthetic oligonucleotide
  source 1..22: mol_type = other RNA
tgtcccatagcaatcatgcgag

SEQ ID NO: 989 - RNA, 22 nt, synthetic construct
  misc_feature 1..22: note = Synthetic oligonucleotide
  source 1..22: mol_type = other RNA
ttgtcccatagcaatcatgcga

SEQ ID NO: 990 - RNA, 22 nt, synthetic construct
  misc_feature 1..22: note = Synthetic oligonucleotide
  source 1..22: mol_type = other RNA
cttgtcccatagcaatcatgcg

SEQ ID NO: 991 - RNA, 22 nt, synthetic construct
  misc_feature 1..22: note = Synthetic oligonucleotide
  source 1..22: mol_type = other RNA
acttgtcccatagcaatcatgc

SEQ ID NO: 992 - RNA, 22 nt, synthetic construct
  misc_feature 1..22: note = Synthetic oligonucleotide
  source 1..22: mol_type = other RNA
aacttgtcccatagcaatcatg

SEQ ID NO: 993 - RNA, 22 nt, synthetic construct
  misc_feature 1..22: note = Synthetic oligonucleotide
  source 1..22: mol_type = other RNA
gaaaacttgtcccatagcaatc

SEQ ID NO: 994 - RNA, 22 nt, synthetic construct
  misc_feature 1..22: note = Synthetic oligonucleotide
  source 1..22: mol_type = other RNA
gatgaaaacttgtcccatagca

SEQ ID NO: 995 - RNA, 22 nt, synthetic construct
  misc_feature 1..22: note = Synthetic oligonucleotide
  source 1..22: mol_type = other RNA
agatgaaaacttgtcccatagc

SEQ ID NO: 996 - RNA, 22 nt, synthetic construct
  misc_feature 1..22: note = Synthetic oligonucleotide
  source 1..22: mol_type = other RNA
cagatgaaaacttgtcccatag

SEQ ID NO: 997 - RNA, 22 nt, synthetic construct
  misc_feature 1..22: note = Synthetic oligonucleotide
  source 1..22: mol_type = other RNA
gcagatgaaaacttgtcccata

SEQ ID NO: 998 - RNA, 22 nt, synthetic construct
  misc_feature 1..22: note = Synthetic oligonucleotide
  source 1..22: mol_type = other RNA
tgcagatgaaaacttgtcccat

SEQ ID NO: 999 - RNA, 22 nt, synthetic construct
  misc_feature 1..22: note = Synthetic oligonucleotide
  source 1..22: mol_type = other RNA
ctgcagatgaaaacttgtccca

SEQ ID NO: 1000 - RNA, 22 nt, synthetic construct
  misc_feature 1..22: note = Synthetic oligonucleotide
  source 1..22: mol_type = other RNA
actgcagatgaaaacttgtccc

SEQ ID NO: 1001 - RNA, 22 nt, synthetic construct
  misc_feature 1..22: note = Synthetic oligonucleotide
  source 1..22: mol_type = other RNA
aactgcagatgaaaacttgtcc

SEQ ID NO: 1002 - RNA, 22 nt, synthetic construct
  misc_feature 1..22: note = Synthetic oligonucleotide
  source 1..22: mol_type = other RNA
gggaaacagatttaaactgcag

SEQ ID NO: 1003 - RNA, 22 nt, synthetic construct
  misc_feature 1..22: note = Synthetic oligonucleotide
  source 1..22: mol_type = other RNA
gatctagaattccaaaccccta

SEQ ID NO: 1004 - RNA, 22 nt, synthetic construct
  misc_feature 1..22: note = Synthetic oligonucleotide
  source 1..22: mol_type = other RNA
cgatctagaattccaaacccct

SEQ ID NO: 1005 - RNA, 22 nt, synthetic construct
  misc_feature 1..22: note = Synthetic oligonucleotide
  source 1..22: mol_type = other RNA
acgatctagaattccaaacccc

SEQ ID NO: 1006 - RNA, 22 nt, synthetic construct
  misc_feature 1..22: note = Synthetic oligonucleotide
  source 1..22: mol_type = other RNA
tacgatctagaattccaaaccc

SEQ ID NO: 1007 - RNA, 22 nt, synthetic construct
  misc_feature 1..22: note = Synthetic oligonucleotide
  source 1..22: mol_type = other RNA
caccaacacttcaaatacgatc

SEQ ID NO: 1008 - RNA, 22 nt, synthetic construct
  misc_feature 1..22: note = Synthetic oligonucleotide
  source 1..22: mol_type = other RNA
gcaccaacacttcaaatacgat

SEQ ID NO: 1009 - RNA, 22 nt, synthetic construct
  misc_feature 1..22: note = Synthetic oligonucleotide
  source 1..22: mol_type = other RNA
ggcaccaacacttcaaatacga

SEQ ID NO: 1010 - RNA, 22 nt, synthetic construct
  misc_feature 1..22: note = Synthetic oligonucleotide
  source 1..22: mol_type = other RNA
tggcaccaacacttcaaatacg

SEQ ID NO: 1011 - RNA, 22 nt, synthetic construct
  misc_feature 1..22: note = Synthetic oligonucleotide
  source 1..22: mol_type = other RNA
gtggcaccaacacttcaaatac

SEQ ID NO: 1012 - RNA, 22 nt, synthetic construct
  misc_feature 1..22: note = Synthetic oligonucleotide
  source 1..22: mol_type = other RNA
tgtggcaccaacacttcaaata

SEQ ID NO: 1013 - RNA, 22 nt, synthetic construct
  misc_feature 1..22: note = Synthetic oligonucleotide
  source 1..22: mol_type = other RNA
gtgtggcaccaacacttcaaat

SEQ ID NO: 1014 - RNA, 22 nt, synthetic construct
  misc_feature 1..22: note = Synthetic oligonucleotide
  source 1..22: mol_type = other RNA
agcgtgcaggtgttaaggtgtg

SEQ ID NO: 1015 - RNA, 22 nt, synthetic construct
  misc_feature 1..22: note = Synthetic oligonucleotide
  source 1..22: mol_type = other RNA
cagcgtgcaggtgttaaggtgt

SEQ ID NO: 1016 - RNA, 22 nt, synthetic construct
  misc_feature 1..22: note = Synthetic oligonucleotide
  source 1..22: mol_type = other RNA
ccagcgtgcaggtgttaaggtg

SEQ ID NO: 1017 - RNA, 22 nt, synthetic construct
  misc_feature 1..22: note = Synthetic oligonucleotide
  source 1..22: mol_type = other RNA
gccagcgtgcaggtgttaaggt

SEQ ID NO: 1018 - RNA, 22 nt, synthetic construct
  misc_feature 1..22: note = Synthetic oligonucleotide
  source 1..22: mol_type = other RNA
tgccagcgtgcaggtgttaagg

SEQ ID NO: 1019 - RNA, 22 nt, synthetic construct
  misc_feature 1..22: note = Synthetic oligonucleotide
  source 1..22: mol_type = other RNA
ttgccagcgtgcaggtgttaag

SEQ ID NO: 1020 - RNA, 22 nt, synthetic construct
  misc_feature 1..22: note = Synthetic oligonucleotide
  source 1..22: mol_type = other RNA
gttgccagcgtgcaggtgttaa

SEQ ID NO: 1021 - RNA, 22 nt, synthetic construct
  misc_feature 1..22: note = Synthetic oligonucleotide
  source 1..22: mol_type = other RNA
tgttgccagcgtgcaggtgtta

SEQ ID NO: 1022 - RNA, 22 nt, synthetic construct
  misc_feature 1..22: note = Synthetic oligonucleotide
  source 1..22: mol_type = other RNA
ttgttgccagcgtgcaggtgtt

SEQ ID NO: 1023 - RNA, 22 nt, synthetic construct
  misc_feature 1..22: note = Synthetic oligonucleotide
  source 1..22: mol_type = other RNA
tttgttgccagcgtgcaggtgt

SEQ ID NO: 1024 - RNA, 22 nt, synthetic construct
  misc_feature 1..22: note = Synthetic oligonucleotide
  source 1..22: mol_type = other RNA
ttttgttgccagcgtgcaggtg

SEQ ID NO: 1025 - RNA, 22 nt, synthetic construct
  misc_feature 1..22: note = Synthetic oligonucleotide
  source 1..22: mol_type = other RNA
gttttgttgccagcgtgcaggt

SEQ ID NO: 1026 - RNA, 22 nt, synthetic construct
  misc_feature 1..22: note = Synthetic oligonucleotide
  source 1..22: mol_type = other RNA
ggttttgttgccagcgtgcagg

SEQ ID NO: 1027 - RNA, 22 nt, synthetic construct
  misc_feature 1..22: note = Synthetic oligonucleotide
  source 1..22: mol_type = other RNA
cggttttgttgccagcgtgcag

SEQ ID NO: 1028 - RNA, 22 nt, synthetic construct
  misc_feature 1..22: note = Synthetic oligonucleotide
  source 1..22: mol_type = other RNA
acggttttgttgccagcgtgca

SEQ ID NO: 1029 - RNA, 22 nt, synthetic construct
  misc_feature 1..22: note = Synthetic oligonucleotide
  source 1..22: mol_type = other RNA
gacggttttgttgccagcgtgc

SEQ ID NO: 1030 - RNA, 22 nt, synthetic construct
  misc_feature 1..22: note = Synthetic oligonucleotide
  source 1..22: mol_type = other RNA
ggacggttttgttgccagcgtg

SEQ ID NO: 1031 - RNA, 22 nt, synthetic construct
  misc_feature 1..22: note = Synthetic oligonucleotide
  source 1..22: mol_type = other RNA
cggacggttttgttgccagcgt

SEQ ID NO: 1032 - RNA, 22 nt, synthetic construct
  misc_feature 1..22: note = Synthetic oligonucleotide
  source 1..22: mol_type = other RNA
gcggacggttttgttgccagcg

SEQ ID NO: 1033 - RNA, 22 nt, synthetic construct
  misc_feature 1..22: note = Synthetic oligonucleotide
  source 1..22: mol_type = other RNA
agcggacggttttgttgccagc

SEQ ID NO: 1034 - RNA, 22 nt, synthetic construct
  misc_feature 1..22: note = Synthetic oligonucleotide
  source 1..22: mol_type = other RNA
gagcggacggttttgttgccag

SEQ ID NO: 1035 - RNA, 22 nt, synthetic construct
  misc_feature 1..22: note = Synthetic oligonucleotide
  source 1..22: mol_type = other RNA
agagcggacggttttgttgcca

SEQ ID NO: 1036 - RNA, 22 nt, synthetic construct
  misc_feature 1..22: note = Synthetic oligonucleotide
  source 1..22: mol_type = other RNA
cagagcggacggttttgttgcc

SEQ ID NO: 1037 - RNA, 22 nt, synthetic construct
  misc_feature 1..22: note = Synthetic oligonucleotide
  source 1..22: mol_type = other RNA
gcagagcggacggttttgttgc

SEQ ID NO: 1038 - RNA, 22 nt, synthetic construct
  misc_feature 1..22: note = Synthetic oligonucleotide
  source 1..22: mol_type = other RNA
tgcagagcggacggttttgttg

SEQ ID NO: 1039 - RNA, 22 nt, synthetic construct
  misc_feature 1..22: note = Synthetic oligonucleotide
  source 1..22: mol_type = other RNA
ctgcagagcggacggttttgtt

SEQ ID NO: 1040 - RNA, 22 nt, synthetic construct
  misc_feature 1..22: note = Synthetic oligonucleotide
  source 1..22: mol_type = other RNA
gctgcagagcggacggttttgt

SEQ ID NO: 1041 - RNA, 22 nt, synthetic construct
  misc_feature 1..22: note = Synthetic oligonucleotide
  source 1..22: mol_type = other RNA
tgctgcagagcggacggttttg

SEQ ID NO: 1042 - RNA, 22 nt, synthetic construct
  misc_feature 1..22: note = Synthetic oligonucleotide
  source 1..22: mol_type = other RNA
gtgctgcagagcggacggtttt

SEQ ID NO: 1043 - RNA, 22 nt, synthetic construct
  misc_feature 1..22: note = Synthetic oligonucleotide
  source 1..22: mol_type = other RNA
tgtgctgcagagcggacggttt

SEQ ID NO: 1044 - RNA, 22 nt, synthetic construct
  misc_feature 1..22: note = Synthetic oligonucleotide
  source 1..22: mol_type = other RNA
ctgtgctgcagagcggacggtt

SEQ ID NO: 1045 - RNA, 22 nt, synthetic construct
  misc_feature 1..22: note = Synthetic oligonucleotide
  source 1..22: mol_type = other RNA
gctgtgctgcagagcggacggt

SEQ ID NO: 1046 - RNA, 22 nt, synthetic construct
  misc_feature 1..22: note = Synthetic oligonucleotide
  source 1..22: mol_type = other RNA
agctgtgctgcagagcggacgg

SEQ ID NO: 1047 - RNA, 22 nt, synthetic construct
  misc_feature 1..22: note = Synthetic oligonucleotide
  source 1..22: mol_type = other RNA
cagctgtgctgcagagcggacg

SEQ ID NO: 1048 - RNA, 22 nt, synthetic construct
  misc_feature 1..22: note = Synthetic oligonucleotide
  source 1..22: mol_type = other RNA
ccagctgtgctgcagagcggac

SEQ ID NO: 1049 - RNA, 22 nt, synthetic construct
  misc_feature 1..22: note = Synthetic oligonucleotide
  source 1..22: mol_type = other RNA
cccagctgtgctgcagagcgga

SEQ ID NO: 1050 - RNA, 22 nt, synthetic construct
  misc_feature 1..22: note = Synthetic oligonucleotide
  source 1..22: mol_type = other RNA
accccagctgtgctgcagagcg

SEQ ID NO: 1051 - RNA, 22 nt, synthetic construct
  misc_feature 1..22: note = Synthetic oligonucleotide
  source 1..22: mol_type = other RNA
gaccccagctgtgctgcagagc

SEQ ID NO: 1052 - RNA, 22 nt, synthetic construct
  misc_feature 1..22: note = Synthetic oligonucleotide
  source 1..22: mol_type = other RNA
tgaccccagctgtgctgcagag

SEQ ID NO: 1053 - RNA, 22 nt, synthetic construct
  misc_feature 1..22: note = Synthetic oligonucleotide
  source 1..22: mol_type = other RNA
gtgaccccagctgtgctgcaga

SEQ ID NO: 1054 - RNA, 22 nt, synthetic construct
  misc_feature 1..22: note = Synthetic oligonucleotide
  source 1..22: mol_type = other RNA
ggtgaccccagctgtgctgcag

SEQ ID NO: 1055 - RNA, 22 nt, synthetic construct
  misc_feature 1..22: note = Synthetic oligonucleotide
  source 1..22: mol_type = other RNA
aggtgaccccagctgtgctgca

SEQ ID NO: 1056 - RNA, 22 nt, synthetic construct
  misc_feature 1..22: note = Synthetic oligonucleotide
  source 1..22: mol_type = other RNA
caggtgaccccagctgtgctgc

SEQ ID NO: 1057 - RNA, 22 nt, synthetic construct
  misc_feature 1..22: note = Synthetic oligonucleotide
  source 1..22: mol_type = other RNA
tcaggtgaccccagctgtgctg

SEQ ID NO: 1058 - RNA, 22 nt, synthetic construct
  misc_feature 1..22: note = Synthetic oligonucleotide
  source 1..22: mol_type = other RNA
gtcaggtgaccccagctgtgct

SEQ ID NO: 1059 - RNA, 22 nt, synthetic construct
  misc_feature 1..22: note = Synthetic oligonucleotide
  source 1..22: mol_type = other RNA
ggtcaggtgaccccagctgtgc

SEQ ID NO: 1060 - RNA, 22 nt, synthetic construct
  misc_feature 1..22: note = Synthetic oligonucleotide
  source 1..22: mol_type = other RNA
aggtcaggtgaccccagctgtg

SEQ ID NO: 1061 - RNA, 22 nt, synthetic construct
  misc_feature 1..22: note = Synthetic oligonucleotide
  source 1..22: mol_type = other RNA
aaggtcaggtgaccccagctgt

SEQ ID NO: 1062 - RNA, 22 nt, synthetic construct
  misc_feature 1..22: note = Synthetic oligonucleotide
  source 1..22: mol_type = other RNA
aaaggtcaggtgaccccagctg

SEQ ID NO: 1063 - RNA, 22 nt, synthetic construct
  misc_feature 1..22: note = Synthetic oligonucleotide
  source 1..22: mol_type = other RNA
gaaaggtcaggtgaccccagct

SEQ ID NO: 1064 - RNA, 22 nt, synthetic construct
  misc_feature 1..22: note = Synthetic oligonucleotide
  source 1..22: mol_type = other RNA
agaaaggtcaggtgaccccagc

SEQ ID NO: 1065 - RNA, 22 nt, synthetic construct
  misc_feature 1..22: note = Synthetic oligonucleotide
  source 1..22: mol_type = other RNA
gagaaaggtcaggtgaccccag

SEQ ID NO: 1066 - RNA, 22 nt, synthetic construct
  misc_feature 1..22: note = Synthetic oligonucleotide
  source 1..22: mol_type = other RNA
ggagaaaggtcaggtgacccca

SEQ ID NO: 1067 - RNA, 22 nt, synthetic construct
  misc_feature 1..22: note = Synthetic oligonucleotide
  source 1..22: mol_type = other RNA
aggagaaaggtcaggtgacccc

SEQ ID NO: 1068 - RNA, 22 nt, synthetic construct
  misc_feature 1..22: note = Synthetic oligonucleotide
  source 1..22: mol_type = other RNA
caggagaaaggtcaggtgaccc

SEQ ID NO: 1069 - RNA, 22 nt, synthetic construct
  misc_feature 1..22: note = Synthetic oligonucleotide
  source 1..22: mol_type = other RNA
acaggagaaaggtcaggtgacc

SEQ ID NO: 1070 - RNA, 22 nt, synthetic construct
  misc_feature 1..22: note = Synthetic oligonucleotide
  source 1..22: mol_type = other RNA
gacaggagaaaggtcaggtgac

SEQ ID NO: 1071 - RNA, 22 nt, synthetic construct
  misc_feature 1..22: note = Synthetic oligonucleotide
  source 1..22: mol_type = other RNA
ggacaggagaaaggtcaggtga

SEQ ID NO: 1072 - RNA, 22 nt, synthetic construct
  misc_feature 1..22: note = Synthetic oligonucleotide
  source 1..22: mol_type = other RNA
gggacaggagaaaggtcaggtg

SEQ ID NO: 1073 - RNA, 22 nt, synthetic construct
  misc_feature 1..22: note = Synthetic oligonucleotide
  source 1..22: mol_type = other RNA
cagccactgagctcaagtgggg

SEQ ID NO: 1074 - RNA, 22 nt, synthetic construct
  misc_feature 1..22: note = Synthetic oligonucleotide
  source 1..22: mol_type = other RNA
ccagccactgagctcaagtggg

SEQ ID NO: 1075 - RNA, 22 nt, synthetic construct
  misc_feature 1..22: note = Synthetic oligonucleotide
  source 1..22: mol_type = other RNA
cccagccactgagctcaagtgg

SEQ ID NO: 1076 - RNA, 22 nt, synthetic construct
  misc_feature 1..22: note = Synthetic oligonucleotide
  source 1..22: mol_type = other RNA
gcccagccactgagctcaagtg

SEQ ID NO: 1077 - RNA, 22 nt, synthetic construct
  misc_feature 1..22: note = Synthetic oligonucleotide
  source 1..22: mol_type = other RNA
tgcccagccactgagctcaagt

SEQ ID NO: 1078 - RNA, 22 nt, synthetic construct
  misc_feature 1..22: note = Synthetic oligonucleotide
  source 1..22: mol_type = other RNA
ctgcccagccactgagctcaag

SEQ ID NO: 1079 - RNA, 22 nt, synthetic construct
  misc_feature 1..22: note = Synthetic oligonucleotide
  source 1..22: mol_type = other RNA
gctgcccagccactgagctcaa

SEQ ID NO: 1080 - RNA, 22 nt, synthetic construct
  misc_feature 1..22: note = Synthetic oligonucleotide
  source 1..22: mol_type = other RNA
tgctgcccagccactgagctca

SEQ ID NO: 1081 - RNA, 22 nt, synthetic construct
  misc_feature 1..22: note = Synthetic oligonucleotide
  source 1..22: mol_type = other RNA
ctgctgcccagccactgagctc

SEQ ID NO: 1082 - RNA, 22 nt, synthetic construct
  misc_feature 1..22: note = Synthetic oligonucleotide
  source 1..22: mol_type = other RNA
cctgctgcccagccactgagct

SEQ ID NO: 1083 - RNA, 22 nt, synthetic construct
  misc_feature 1..22: note = Synthetic oligonucleotide
  source 1..22: mol_type = other RNA
tcccctgctgcccagccactga

SEQ ID NO: 1084 - RNA, 22 nt, synthetic construct
  misc_feature 1..22: note = Synthetic oligonucleotide
  source 1..22: mol_type = other RNA
atcccctgctgcccagccactg

SEQ ID NO: 1085 - RNA, 22 nt, synthetic construct
  misc_feature 1..22: note = Synthetic oligonucleotide
  source 1..22: mol_type = other RNA
catcccctgctgcccagccact

SEQ ID NO: 1086 - RNA, 22 nt, synthetic construct
  misc_feature 1..22: note = Synthetic oligonucleotide
  source 1..22: mol_type = other RNA
tgcatcccctgctgcccagcca

SEQ ID NO: 1087 - RNA, 22 nt, synthetic construct
  misc_feature 1..22: note = Synthetic oligonucleotide
  source 1..22: mol_type = other RNA
atgcatcccctgctgcccagcc

SEQ ID NO: 1088 - RNA, 22 nt, synthetic construct
  misc_feature 1..22: note = Synthetic oligonucleotide
  source 1..22: mol_type = other RNA
catgcatcccctgctgcccagc

SEQ ID NO: 1089 - RNA, 22 nt, synthetic construct
  misc_feature 1..22: note = Synthetic oligonucleotide
  source 1..22: mol_type = other RNA
ccatgcatcccctgctgcccag

SEQ ID NO: 1090 - RNA, 22 nt, synthetic construct
  misc_feature 1..22: note = Synthetic oligonucleotide
  source 1..22: mol_type = other RNA
gccatgcatcccctgctgccca

SEQ ID NO: 1091 - RNA, 22 nt, synthetic construct
  misc_feature 1..22: note = Synthetic oligonucleotide
  source 1..22: mol_type = other RNA
tggccatgcatcccctgctgcc

SEQ ID NO: 1092 - RNA, 22 nt, synthetic construct
  misc_feature 1..22: note = Synthetic oligonucleotide
  source 1..22: mol_type = other RNA
gtggccatgcatcccctgctgc

SEQ ID NO: 1093 - RNA, 22 nt, synthetic construct
  misc_feature 1..22: note = Synthetic oligonucleotide
  source 1..22: mol_type = other RNA
agtggccatgcatcccctgctg

SEQ ID NO: 1094 - RNA, 22 nt, synthetic construct
  misc_feature 1..22: note = Synthetic oligonucleotide
  source 1..22: mol_type = other RNA
cagtggccatgcatcccctgct

SEQ ID NO: 1095 - RNA, 22 nt, synthetic construct
  misc_feature 1..22: note = Synthetic oligonucleotide
  source 1..22: mol_type = other RNA
ccagtggccatgcatcccctgc

SEQ ID NO: 1096 - RNA, 22 nt, synthetic construct
  misc_feature 1..22: note = Synthetic oligonucleotide
  source 1..22: mol_type = other RNA
gccagtggccatgcatcccctg

SEQ ID NO: 1097 - RNA, 22 nt, synthetic construct
  misc_feature 1..22: note = Synthetic oligonucleotide
  source 1..22: mol_type = other RNA
ggccagtggccatgcatcccct

SEQ ID NO: 1098 - RNA, 22 nt, synthetic construct
  misc_feature 1..22: note = Synthetic oligonucleotide
  source 1..22: mol_type = other RNA
tggccggccagtggccatgcat

SEQ ID NO: 1099 - RNA, 22 nt, synthetic construct
  misc_feature 1..22: note = Synthetic oligonucleotide
  source 1..22: mol_type = other RNA
agctgagagctgcacctggccg

SEQ ID NO: 1100 - RNA, 22 nt, synthetic construct
  misc_feature 1..22: note = Synthetic oligonucleotide
  source 1..22: mol_type = other RNA
cagctgagagctgcacctggcc

SEQ ID NO: 1101 - RNA, 22 nt, synthetic construct
  misc_feature 1..22: note = Synthetic oligonucleotide
  source 1..22: mol_type = other RNA
ccagctgagagctgcacctggc

SEQ ID NO: 1102 - RNA, 22 nt, synthetic construct
  misc_feature 1..22: note = Synthetic oligonucleotide
  source 1..22: mol_type = other RNA
cccagctgagagctgcacctgg

SEQ ID NO: 1103 - RNA, 22 nt, synthetic construct
  misc_feature 1..22: note = Synthetic oligonucleotide
  source 1..22: mol_type = other RNA
ccccagctgagagctgcacctg

SEQ ID NO: 1104 - RNA, 22 nt, synthetic construct
  misc_feature 1..22: note = Synthetic oligonucleotide
  source 1..22: mol_type = other RNA
accccagctgagagctgcacct

SEQ ID NO: 1105 - RNA, 22 nt, synthetic construct
  misc_feature 1..22: note = Synthetic oligonucleotide
  source 1..22: mol_type = other RNA
caccccagctgagagctgcacc

SEQ ID NO: 1106 - RNA, 22 nt, synthetic construct
  misc_feature 1..22: note = Synthetic oligonucleotide
  source 1..22: mol_type = other RNA
acaccccagctgagagctgcac

SEQ ID NO: 1107 - RNA, 22 nt, synthetic construct
  misc_feature 1..22: note = Synthetic oligonucleotide
  source 1..22: mol_type = other RNA
aacaccccagctgagagctgca

SEQ ID NO: 1108 - RNA, 22 nt, synthetic construct
  misc_feature 1..22: note = Synthetic oligonucleotide
  source 1..22: mol_type = other RNA
gaacaccccagctgagagctgc

SEQ ID NO: 1109 - RNA, 22 nt, synthetic construct
  misc_feature 1..22: note = Synthetic oligonucleotide
  source 1..22: mol_type = other RNA
tgaacaccccagctgagagctg

SEQ ID NO: 1110 - RNA, 22 nt, synthetic construct
  misc_feature 1..22: note = Synthetic oligonucleotide
  source 1..22: mol_type = other RNA
ctgaacaccccagctgagagct

SEQ ID NO: 1111 - RNA, 22 nt, synthetic construct
  misc_feature 1..22: note = Synthetic oligonucleotide
  source 1..22: mol_type = other RNA
tctgaacaccccagctgagagc

SEQ ID NO: 1112 - RNA, 22 nt, synthetic construct
  misc_feature 1..22: note = Synthetic oligonucleotide
  source 1..22: mol_type = other RNA
ctctgaacaccccagctgagag

SEQ ID NO: 1113 - RNA, 22 nt, synthetic construct
  misc_feature 1..22: note = Synthetic oligonucleotide
  source 1..22: mol_type = other RNA
cctctgaacaccccagctgaga

SEQ ID NO: 1114 - RNA, 22 nt, synthetic construct
  misc_feature 1..22: note = Synthetic oligonucleotide
  source 1..22: mol_type = other RNA
tcctctgaacaccccagctgag

SEQ ID NO: 1115 - RNA, 22 nt, synthetic construct
  misc_feature 1..22: note = Synthetic oligonucleotide
  source 1..22: mol_type = other RNA
gtcctctgaacaccccagctga

SEQ ID NO: 1116 - RNA, 22 nt, synthetic construct
  misc_feature 1..22: note = Synthetic oligonucleotide
  source 1..22: mol_type = other RNA
cgtcctctgaacaccccagctg

SEQ ID NO: 1117 - RNA, 22 nt, synthetic construct
  misc_feature 1..22: note = Synthetic oligonucleotide
  source 1..22: mol_type = other RNA
gcgtcctctgaacaccccagct

SEQ ID NO: 1118 - RNA, 22 nt, synthetic construct
  misc_feature 1..22: note = Synthetic oligonucleotide
  source 1..22: mol_type = other RNA
ggcgtcctctgaacaccccagc

SEQ ID NO: 1119 - RNA, 22 nt, synthetic construct
  misc_feature 1..22: note = Synthetic oligonucleotide
  source 1..22: mol_type = other RNA
aggcgtcctctgaacaccccag

SEQ ID NO: 1120 - RNA, 22 nt, synthetic construct
  misc_feature 1..22: note = Synthetic oligonucleotide
  source 1..22: mol_type = other RNA
caggcgtcctctgaacacccca

SEQ ID NO: 1121 - RNA, 22 nt, synthetic construct
  misc_feature 1..22: note = Synthetic oligonucleotide
  source 1..22: mol_type = other RNA
acaggcgtcctctgaacacccc

SEQ ID NO: 1122 - RNA, 22 nt, synthetic construct
  misc_feature 1..22: note = Synthetic oligonucleotide
  source 1..22: mol_type = other RNA
cacaggcgtcctctgaacaccc

SEQ ID NO: 1123 - RNA, 22 nt, synthetic construct
  misc_feature 1..22: note = Synthetic oligonucleotide
  source 1..22: mol_type = other RNA
acacaggcgtcctctgaacacc

SEQ ID NO: 1124 - RNA, 22 nt, synthetic construct
  misc_feature 1..22: note = Synthetic oligonucleotide
  source 1..22: mol_type = other RNA
gacacaggcgtcctctgaacac

SEQ ID NO: 1125 - RNA, 22 nt, synthetic construct
  misc_feature 1..22: note = Synthetic oligonucleotide
  source 1..22: mol_type = other RNA
ggacacaggcgtcctctgaaca

SEQ ID NO: 1126 - RNA, 22 nt, synthetic construct
  misc_feature 1..22: note = Synthetic oligonucleotide
  source 1..22: mol_type = other RNA
aggacacaggcgtcctctgaac

SEQ ID NO: 1127 - RNA, 22 nt, synthetic construct
  misc_feature 1..22: note = Synthetic oligonucleotide
  source 1..22: mol_type = other RNA
gaggacacaggcgtcctctgaa

SEQ ID NO: 1128 - RNA, 22 nt, synthetic construct
  misc_feature 1..22: note = Synthetic oligonucleotide
  source 1..22: mol_type = other RNA
ggaggacacaggcgtcctctga

SEQ ID NO: 1129 - RNA, 22 nt, synthetic construct
  misc_feature 1..22: note = Synthetic oligonucleotide
  source 1..22: mol_type = other RNA
gggaggacacaggcgtcctctg

SEQ ID NO: 1130 - RNA, 22 nt, synthetic construct
  misc_feature 1..22: note = Synthetic oligonucleotide
  source 1..22: mol_type = other RNA
ggggaggacacaggcgtcctct

SEQ ID NO: 1131 - RNA, 22 nt, synthetic construct
  misc_feature 1..22: note = Synthetic oligonucleotide
  source 1..22: mol_type = other RNA
aggggaggacacaggcgtcctc

SEQ ID NO: 1132 - RNA, 22 nt, synthetic construct
  misc_feature 1..22: note = Synthetic oligonucleotide
  source 1..22: mol_type = other RNA
gaggggaggacacaggcgtcct

SEQ ID NO: 1133 - RNA, 22 nt, synthetic construct
  misc_feature 1..22: note = Synthetic oligonucleotide
  source 1..22: mol_type = other RNA
tctgcctccaagggtgacagag

SEQ ID NO: 1134 - RNA, 22 nt, synthetic construct
  misc_feature 1..22: note = Synthetic oligonucleotide
  source 1..22: mol_type = other RNA
ctctgcctccaagggtgacaga

SEQ ID NO: 1135 - RNA, 22 nt, synthetic construct
  misc_feature 1..22: note = Synthetic oligonucleotide
  source 1..22: mol_type = other RNA
tctctgcctccaagggtgacag

SEQ ID NO: 1136 - RNA, 22 nt, synthetic construct
  misc_feature 1..22: note = Synthetic oligonucleotide
  source 1..22: mol_type = other RNA
ttctctgcctccaagggtgaca

SEQ ID NO: 1137 - RNA, 22 nt, synthetic construct
  misc_feature 1..22: note = Synthetic oligonucleotide
  source 1..22: mol_type = other RNA
gttctctgcctccaagggtgac

SEQ ID NO: 1138 - RNA, 22 nt, synthetic construct
  misc_feature 1..22: note = Synthetic oligonucleotide
  source 1..22: mol_type = other RNA
agttctctgcctccaagggtga

SEQ ID NO: 1139 - RNA, 22 nt, synthetic construct
  misc_feature 1..22: note = Synthetic oligonucleotide
  source 1..22: mol_type = other RNA
aagttctctgcctccaagggtg

SEQ ID NO: 1140 - RNA, 22 nt, synthetic construct
  misc_feature 1..22: note = Synthetic oligonucleotide
  source 1..22: mol_type = other RNA
aaagttctctgcctccaagggt

SEQ ID NO: 1141 - RNA, 22 nt, synthetic construct
  misc_feature 1..22: note = Synthetic oligonucleotide
  source 1..22: mol_type = other RNA
caaagttctctgcctccaaggg

SEQ ID NO: 1142 - RNA, 22 nt, synthetic construct
  misc_feature 1..22: note = Synthetic oligonucleotide
  source 1..22: mol_type = other RNA
gcaaagttctctgcctccaagg

SEQ ID NO: 1143 - RNA, 22 nt, synthetic construct
  misc_feature 1..22: note = Synthetic oligonucleotide
  source 1..22: mol_type = other RNA
ggcaaagttctctgcctccaag

SEQ ID NO: 1144 - RNA, 22 nt, synthetic construct
  misc_feature 1..22: note = Synthetic oligonucleotide
  source 1..22: mol_type = other RNA
gggcaaagttctctgcctccaa

SEQ ID NO: 1145 - RNA, 20 nt, synthetic construct
  misc_feature 1..20: note = Synthetic oligonucleotide
  source 1..20: mol_type = other RNA
ccagcggtccacatcttacg

SEQ ID NO: 1146 - RNA, 20 nt, synthetic construct
  misc_feature 1..20: note = Synthetic oligonucleotide
  source 1..20: mol_type = other RNA
tccagcggtccacatcttac

SEQ ID NO: 1147 - RNA, 20 nt, synthetic construct
  misc_feature 1..20: note = Synthetic oligonucleotide
  source 1..20: mol_type = other RNA
ctccagcggtccacatctta

SEQ ID NO: 1148 - RNA, 20 nt, synthetic construct
  misc_feature 1..20: note = Synthetic oligonucleotide
  source 1..20: mol_type = other RNA
tctccagcggtccacatctt

SEQ ID NO: 1149 - RNA, 20 nt, synthetic construct
  misc_feature 1..20: note = Synthetic oligonucleotide
  source 1..20: mol_type = other RNA
ttctccagcggtccacatct

SEQ ID NO: 1150 - RNA, 20 nt, synthetic construct
  misc_feature 1..20: note = Synthetic oligonucleotide
  source 1..20: mol_type = other RNA
attctccagcggtccacatc

SEQ ID NO: 1151 - RNA, 20 nt, synthetic construct
  misc_feature 1..20: note = Synthetic oligonucleotide
  source 1..20: mol_type = other RNA
cattctccagcggtccacat

SEQ ID NO: 1152 - RNA, 20 nt, synthetic construct
  misc_feature 1..20: note = Synthetic oligonucleotide
  source 1..20: mol_type = other RNA
ccattctccagcggtccaca

SEQ ID NO: 1153 - RNA, 20 nt, synthetic construct
  misc_feature 1..20: note = Synthetic oligonucleotide
  source 1..20: mol_type = other RNA
ttgactgcaggcagcacccc

SEQ ID NO: 1154 - RNA, 20 nt, synthetic construct
  misc_feature 1..20: note = Synthetic oligonucleotide
  source 1..20: mol_type = other RNA
tttgactgcaggcagcaccc

SEQ ID NO: 1155 - RNA, 20 nt, synthetic construct
  misc_feature 1..20: note = Synthetic oligonucleotide
  source 1..20: mol_type = other RNA
ttttgactgcaggcagcacc

SEQ ID NO: 1156 - RNA, 20 nt, synthetic construct
  misc_feature 1..20: note = Synthetic oligonucleotide
  source 1..20: mol_type = other RNA
gttttgactgcaggcagcac

SEQ ID NO: 1157 - RNA, 20 nt, synthetic construct
  misc_feature 1..20: note = Synthetic oligonucleotide
  source 1..20: mol_type = other RNA
cgttttgactgcaggcagca

SEQ ID NO: 1158 - RNA, 20 nt, synthetic construct
  misc_feature 1..20: note = Synthetic oligonucleotide
  source 1..20: mol_type = other RNA
ccgttttgactgcaggcagc

SEQ ID NO: 1159 - RNA, 20 nt, synthetic construct
  misc_feature 1..20: note = Synthetic oligonucleotide
  source 1..20: mol_type = other RNA
tccgttttgactgcaggcag

SEQ ID NO: 1160 - RNA, 20 nt, synthetic construct
  misc_feature 1..20: note = Synthetic oligonucleotide
  source 1..20: mol_type = other RNA
ctccgttttgactgcaggca

SEQ ID NO: 1161 - RNA, 20 nt, synthetic construct
  misc_feature 1..20: note = Synthetic oligonucleotide
  source 1..20: mol_type = other RNA
actccgttttgactgcaggc

SEQ ID NO: 1162 - RNA, 20 nt, synthetic construct
  misc_feature 1..20: note = Synthetic oligonucleotide
  source 1..20: mol_type = other RNA
cactccgttttgactgcagg

SEQ ID NO: 1163 - RNA, 20 nt, synthetic construct
  misc_feature 1..20: note = Synthetic oligonucleotide
  source 1..20: mol_type = other RNA
ccactccgttttgactgcag

SEQ ID NO: 1164 - RNA, 20 nt, synthetic construct
  misc_feature 1..20: note = Synthetic oligonucleotide
  source 1..20: mol_type = other RNA
ctggccctgagctgggcacc

SEQ ID NO: 1165 - RNA, 20 nt, synthetic construct
  misc_feature 1..20: note = Synthetic oligonucleotide
  source 1..20: mol_type = other RNA
tctggccctgagctgggcac

SEQ ID NO: 1166 - RNA, 20 nt, synthetic construct
  misc_feature 1..20: note = Synthetic oligonucleotide
  source 1..20: mol_type = other RNA
ttctggccctgagctgggca

SEQ ID NO: 1167 - RNA, 20 nt, synthetic construct
  misc_feature 1..20: note = Synthetic oligonucleotide
  source 1..20: mol_type = other RNA
attctggccctgagctgggc

SEQ ID NO: 1168 - RNA, 20 nt, synthetic construct
  misc_feature 1..20: note = Synthetic oligonucleotide
  source 1..20: mol_type = other RNA
cattctggccctgagctggg

SEQ ID NO: 1169 - RNA, 20 nt, synthetic construct
  misc_feature 1..20: note = Synthetic oligonucleotide
  source 1..20: mol_type = other RNA
tcattctggccctgagctgg

SEQ ID NO: 1170 - RNA, 20 nt, synthetic construct
  misc_feature 1..20: note = Synthetic oligonucleotide
  source 1..20: mol_type = other RNA
atcattctggccctgagctg

SEQ ID NO: 1171 - RNA, 20 nt, synthetic construct
  misc_feature 1..20: note = Synthetic oligonucleotide
  source 1..20: mol_type = other RNA
gatcattctggccctgagct

SEQ ID NO: 1172 - RNA, 20 nt, synthetic construct
  misc_feature 1..20: note = Synthetic oligonucleotide
  source 1..20: mol_type = other RNA
ggatcattctggccctgagc

SEQ ID NO: 1173 - RNA, 20 nt, synthetic construct
  misc_feature 1..20: note = Synthetic oligonucleotide
  source 1..20: mol_type = other RNA
aggatcattctggccctgag

SEQ ID NO: 1174 - RNA, 20 nt, synthetic construct
  misc_feature 1..20: note = Synthetic oligonucleotide
  source 1..20: mol_type = other RNA
taggatcattctggccctga

SEQ ID NO: 1175 - RNA, 20 nt, synthetic construct
  misc_feature 1..20: note = Synthetic oligonucleotide
  source 1..20: mol_type = other RNA
ataggatcattctggccctg

SEQ ID NO: 1176 - RNA, 20 nt, synthetic construct
  misc_feature 1..20: note = Synthetic oligonucleotide
  source 1..20: mol_type = other RNA
aataggatcattctggccct

SEQ ID NO: 1177 - RNA, 20 nt, synthetic construct
  misc_feature 1..20: note = Synthetic oligonucleotide
  source 1..20: mol_type = other RNA
gaataggatcattctggccc

SEQ ID NO: 1178 - RNA, 20 nt, synthetic construct
  misc_feature 1..20: note = Synthetic oligonucleotide
  source 1..20: mol_type = other RNA
ggaataggatcattctggcc

SEQ ID NO: 1179 - RNA, 20 nt, synthetic construct
  misc_feature 1..20: note = Synthetic oligonucleotide
  source 1..20: mol_type = other RNA
gggaataggatcattctggc

SEQ ID NO: 1180 - RNA, 20 nt, synthetic construct
  misc_feature 1..20: note = Synthetic oligonucleotide
  source 1..20: mol_type = other RNA
cgggaataggatcattctgg

SEQ ID NO: 1181 - RNA, 20 nt, synthetic construct
  misc_feature 1..20: note = Synthetic oligonucleotide
  source 1..20: mol_type = other RNA
ccgggaataggatcattctg

SEQ ID NO: 1182 - RNA, 20 nt, synthetic construct
  misc_feature 1..20: note = Synthetic oligonucleotide
  source 1..20: mol_type = other RNA
gccgggaataggatcattct

SEQ ID NO: 1183 - RNA, 20 nt, synthetic construct
  misc_feature 1..20: note = Synthetic oligonucleotide
  source 1..20: mol_type = other RNA
tgccgggaataggatcattc

SEQ ID NO: 1184 - RNA, 20 nt, synthetic construct
  misc_feature 1..20: note = Synthetic oligonucleotide
  source 1..20: mol_type = other RNA
gtgccgggaataggatcatt

SEQ ID NO: 1185 - RNA, 20 nt, synthetic construct
  misc_feature 1..20: note = Synthetic oligonucleotide
  source 1..20: mol_type = other RNA
agtgccgggaataggatcat

SEQ ID NO: 1186 - RNA, 20 nt, synthetic construct
  misc_feature 1..20: note = Synthetic oligonucleotide
  source 1..20: mol_type = other RNA
aagtgccgggaataggatca

SEQ ID NO: 1187 - RNA, 20 nt, synthetic construct
  misc_feature 1..20: note = Synthetic oligonucleotide
  source 1..20: mol_type = other RNA
gaagtgccgggaataggatc

SEQ ID NO: 1188 - RNA, 20 nt, synthetic construct
  misc_feature 1..20: note = Synthetic oligonucleotide
  source 1..20: mol_type = other RNA
agaagtgccgggaataggat

SEQ ID NO: 1189 - RNA, 20 nt, synthetic construct
  misc_feature 1..20: note = Synthetic oligonucleotide
  source 1..20: mol_type = other RNA
gagaagtgccgggaatagga

SEQ ID NO: 1190 - RNA, 20 nt, synthetic construct
  misc_feature 1..20: note = Synthetic oligonucleotide
  source 1..20: mol_type = other RNA
tgagaagtgccgggaatagg

SEQ ID NO: 1191 - RNA, 20 nt, synthetic construct
  misc_feature 1..20: note = Synthetic oligonucleotide
  source 1..20: mol_type = other RNA
ctgagaagtgccgggaatag

SEQ ID NO: 1192 - RNA, 20 nt, synthetic construct
  misc_feature 1..20: note = Synthetic oligonucleotide
  source 1..20: mol_type = other RNA
actgagaagtgccgggaata

SEQ ID NO: 1193 - RNA, 20 nt, synthetic construct
  misc_feature 1..20: note = Synthetic oligonucleotide
  source 1..20: mol_type = other RNA
cactgagaagtgccgggaat

SEQ ID NO: 1194 - RNA, 20 nt, synthetic construct
  misc_feature 1..20: note = Synthetic oligonucleotide
  source 1..20: mol_type = other RNA
tcactgagaagtgccgggaa

SEQ ID NO: 1195 - RNA, 20 nt, synthetic construct
  misc_feature 1..20: note = Synthetic oligonucleotide
  source 1..20: mol_type = other RNA
ctcactgagaagtgccggga

SEQ ID NO: 1196 - RNA, 20 nt, synthetic construct
  misc_feature 1..20: note = Synthetic oligonucleotide
  source 1..20: mol_type = other RNA
cctcactgagaagtgccggg

SEQ ID NO: 1197 - RNA, 20 nt, synthetic construct
  misc_feature 1..20: note = Synthetic oligonucleotide
  source 1..20: mol_type = other RNA
gcctcactgagaagtgccgg

SEQ ID NO: 1198 - RNA, 20 nt, synthetic construct
  misc_feature 1..20: note = Synthetic oligonucleotide
  source 1..20: mol_type = other RNA
agcctcactgagaagtgccg

SEQ ID NO: 1199 - RNA, 20 nt, synthetic construct
  misc_feature 1..20: note = Synthetic oligonucleotide
  source 1..20: mol_type = other RNA
gagcctcactgagaagtgcc

SEQ ID NO: 1200 - RNA, 20 nt, synthetic construct
  misc_feature 1..20: note = Synthetic oligonucleotide
  source 1..20: mol_type = other RNA
agagcctcactgagaagtgc

SEQ ID NO: 1201 - RNA, 20 nt, synthetic construct
  misc_feature 1..20: note = Synthetic oligonucleotide
  source 1..20: mol_type = other RNA
cagagcctcactgagaagtg

SEQ ID NO: 1202 - RNA, 20 nt, synthetic construct
  misc_feature 1..20: note = Synthetic oligonucleotide
  source 1..20: mol_type = other RNA
acagagcctcactgagaagt

SEQ ID NO: 1203 - RNA, 20 nt, synthetic construct
  misc_feature 1..20: note = Synthetic oligonucleotide
  source 1..20: mol_type = other RNA
cacagagcctcactgagaag

SEQ ID NO: 1204 - RNA, 20 nt, synthetic construct
  misc_feature 1..20: note = Synthetic oligonucleotide
  source 1..20: mol_type = other RNA
ccacagagcctcactgagaa

SEQ ID NO: 1205 - RNA, 20 nt, synthetic construct
  misc_feature 1..20: note = Synthetic oligonucleotide
  source 1..20: mol_type = other RNA
gccacagagcctcactgaga

SEQ ID NO: 1206 - RNA, 20 nt, synthetic construct
  misc_feature 1..20: note = Synthetic oligonucleotide
  source 1..20: mol_type = other RNA
agccacagagcctcactgag

SEQ ID NO: 1207 - RNA, 20 nt, synthetic construct
  misc_feature 1..20: note = Synthetic oligonucleotide
  source 1..20: mol_type = other RNA
gagccacagagcctcactga

SEQ ID NO: 1208 - RNA, 20 nt, synthetic construct
  misc_feature 1..20: note = Synthetic oligonucleotide
  source 1..20: mol_type = other RNA
tgagccacagagcctcactg

SEQ ID NO: 1209 - RNA, 20 nt, synthetic construct
  misc_feature 1..20: note = Synthetic oligonucleotide
  source 1..20: mol_type = other RNA
gtgagccacagagcctcact

SEQ ID NO: 1210 - RNA, 20 nt, synthetic construct
  misc_feature 1..20: note = Synthetic oligonucleotide
  source 1..20: mol_type = other RNA
ggtgagccacagagcctcac

SEQ ID NO: 1211 - RNA, 20 nt, synthetic construct
  misc_feature 1..20: note = Synthetic oligonucleotide
  source 1..20: mol_type = other RNA
aggtgagccacagagcctca

SEQ ID NO: 1212 - RNA, 20 nt, synthetic construct
  misc_feature 1..20: note = Synthetic oligonucleotide
  source 1..20: mol_type = other RNA
taggtgagccacagagcctc

SEQ ID NO: 1213 - RNA, 20 nt, synthetic construct
  misc_feature 1..20: note = Synthetic oligonucleotide
  source 1..20: mol_type = other RNA
ttaggtgagccacagagcct

SEQ ID NO: 1214 - RNA, 20 nt, synthetic construct
  misc_feature 1..20: note = Synthetic oligonucleotide
  source 1..20: mol_type = other RNA
cttaggtgagccacagagcc

SEQ ID NO: 1215 - RNA, 20 nt, synthetic construct
  misc_feature 1..20: note = Synthetic oligonucleotide
  source 1..20: mol_type = other RNA
tcttaggtgagccacagagc

SEQ ID NO: 1216 - RNA, 20 nt, synthetic construct
  misc_feature 1..20: note = Synthetic oligonucleotide
  source 1..20: mol_type = other RNA
ttcttaggtgagccacagag

SEQ ID NO: 1217 - RNA, 20 nt, synthetic construct
  misc_feature 1..20: note = Synthetic oligonucleotide
  source 1..20: mol_type = other RNA
tttcttaggtgagccacaga

SEQ ID NO: 1218 - RNA, 20 nt, synthetic construct
  misc_feature 1..20: note = Synthetic oligonucleotide
  source 1..20: mol_type = other RNA
gtttcttaggtgagccacag

SEQ ID NO: 1219 - RNA, 20 nt, synthetic construct
  misc_feature 1..20: note = Synthetic oligonucleotide
  source 1..20: mol_type = other RNA
ggtttcttaggtgagccaca

SEQ ID NO: 1220 - RNA, 20 nt, synthetic construct
  misc_feature 1..20: note = Synthetic oligonucleotide
  source 1..20: mol_type = other RNA
tggtttcttaggtgagccac

SEQ ID NO: 1221 - RNA, 20 nt, synthetic construct
  misc_feature 1..20: note = Synthetic oligonucleotide
  source 1..20: mol_type = other RNA
ctggtttcttaggtgagcca

SEQ ID NO: 1222 - RNA, 20 nt, synthetic construct
  misc_feature 1..20: note = Synthetic oligonucleotide
  source 1..20: mol_type = other RNA
gctggtttcttaggtgagcc

SEQ ID NO: 1223 - RNA, 20 nt, synthetic construct
  misc_feature 1..20: note = Synthetic oligonucleotide
  source 1..20: mol_type = other RNA
ggctggtttcttaggtgagc

SEQ ID NO: 1224 - RNA, 20 nt, synthetic construct
  misc_feature 1..20: note = Synthetic oligonucleotide
  source 1..20: mol_type = other RNA
aggctggtttcttaggtgag

SEQ ID NO: 1225 - RNA, 20 nt, synthetic construct
  misc_feature 1..20: note = Synthetic oligonucleotide
  source 1..20: mol_type = other RNA
gaggctggtttcttaggtga

SEQ ID NO: 1226 - RNA, 20 nt, synthetic construct
  misc_feature 1..20: note = Synthetic oligonucleotide
  source 1..20: mol_type = other RNA
ggaggctggtttcttaggtg

SEQ ID NO: 1227 - RNA, 20 nt, synthetic construct
  misc_feature 1..20: note = Synthetic oligonucleotide
  source 1..20: mol_type = other RNA
gggaggctggtttcttaggt

SEQ ID NO: 1228 - RNA, 20 nt, synthetic construct
  misc_feature 1..20: note = Synthetic oligonucleotide
  source 1..20: mol_type = other RNA
agggaggctggtttcttagg

SEQ ID NO: 1229 - RNA, 20 nt, synthetic construct
  misc_feature 1..20: note = Synthetic oligonucleotide
  source 1..20: mol_type = other RNA
aagggaggctggtttcttag

SEQ ID NO: 1230 - RNA, 20 nt, synthetic construct
  misc_feature 1..20: note = Synthetic oligonucleotide
  source 1..20: mol_type = other RNA
caagggaggctggtttctta

SEQ ID NO: 1231 - RNA, 20 nt, synthetic construct
  misc_feature 1..20: note = Synthetic oligonucleotide
  source 1..20: mol_type = other RNA
gcaagggaggctggtttctt

SEQ ID NO: 1232 - RNA, 20 nt, synthetic construct
  misc_feature 1..20: note = Synthetic oligonucleotide
  source 1..20: mol_type = other RNA
tgcaagggaggctggtttct

SEQ ID NO: 1233 - RNA, 20 nt, synthetic construct
  misc_feature 1..20: note = Synthetic oligonucleotide
  source 1..20: mol_type = other RNA
ctgcaagggaggctggtttc

SEQ ID NO: 1234 - RNA, 20 nt, synthetic construct
  misc_feature 1..20: note = Synthetic oligonucleotide
  source 1..20: mol_type = other RNA
cctgcaagggaggctggttt

SEQ ID NO: 1235 - RNA, 20 nt, synthetic construct
  misc_feature 1..20: note = Synthetic oligonucleotide
  source 1..20: mol_type = other RNA
gcctgcaagggaggctggtt

SEQ ID NO: 1236 - RNA, 20 nt, synthetic construct
  misc_feature 1..20: note = Synthetic oligonucleotide
  source 1..20: mol_type = other RNA
tgcctgcaagggaggctggt

SEQ ID NO: 1237 - RNA, 20 nt, synthetic construct
  misc_feature 1..20: note = Synthetic oligonucleotide
  source 1..20: mol_type = other RNA
ttgcctgcaagggaggctgg

SEQ ID NO: 1238 - RNA, 20 nt, synthetic construct
  misc_feature 1..20: note = Synthetic oligonucleotide
  source 1..20: mol_type = other RNA
gttgcctgcaagggaggctg

SEQ ID NO: 1239 - RNA, 20 nt, synthetic construct
  misc_feature 1..20: note = Synthetic oligonucleotide
  source 1..20: mol_type = other RNA
cgttgcctgcaagggaggct

SEQ ID NO: 1240 - RNA, 20 nt, synthetic construct
  misc_feature 1..20: note = Synthetic oligonucleotide
  source 1..20: mol_type = other RNA
gccgttgcctgcaagggagg

SEQ ID NO: 1241 - RNA, 20 nt, synthetic construct
  misc_feature 1..20: note = Synthetic oligonucleotide
  source 1..20: mol_type = other RNA
ggccgttgcctgcaagggag

SEQ ID NO: 1242 - RNA, 20 nt, synthetic construct
  misc_feature 1..20: note = Synthetic oligonucleotide
  source 1..20: mol_type = other RNA
aggccgttgcctgcaaggga

SEQ ID NO: 1243 - RNA, 20 nt, synthetic construct
  misc_feature 1..20: note = Synthetic oligonucleotide
  source 1..20: mol_type = other RNA
taggccgttgcctgcaaggg

SEQ ID NO: 1244 - RNA, 20 nt, synthetic construct
  misc_feature 1..20: note = Synthetic oligonucleotide
  source 1..20: mol_type = other RNA
ctaggccgttgcctgcaagg

SEQ ID NO: 1245 - RNA, 20 nt, synthetic construct
  misc_feature 1..20: note = Synthetic oligonucleotide
  source 1..20: mol_type = other RNA
gctaggccgttgcctgcaag

SEQ ID NO: 1246 - RNA, 20 nt, synthetic construct
  misc_feature 1..20: note = Synthetic oligonucleotide
  source 1..20: mol_type = other RNA
agctaggccgttgcctgcaa

SEQ ID NO: 1247 - RNA, 20 nt, synthetic construct
  misc_feature 1..20: note = Synthetic oligonucleotide
  source 1..20: mol_type = other RNA
cagctaggccgttgcctgca

SEQ ID NO: 1248 - RNA, 20 nt, synthetic construct
  misc_feature 1..20: note = Synthetic oligonucleotide
  source 1..20: mol_type = other RNA
gccagctaggccgttgcctg

SEQ ID NO: 1249 - RNA, 20 nt, synthetic construct
  misc_feature 1..20: note = Synthetic oligonucleotide
  source 1..20: mol_type = other RNA
ggccagctaggccgttgcct

SEQ ID NO: 1250 - RNA, 20 nt, synthetic construct
  misc_feature 1..20: note = Synthetic oligonucleotide
  source 1..20: mol_type = other RNA
caggccagctaggccgttgc

SEQ ID NO: 1251 - RNA, 20 nt, synthetic construct
  misc_feature 1..20: note = Synthetic oligonucleotide
  source 1..20: mol_type = other RNA
ccaggccagctaggccgttg

SEQ ID NO: 1252 - RNA, 20 nt, synthetic construct
  misc_feature 1..20: note = Synthetic oligonucleotide
  source 1..20: mol_type = other RNA
accaggccagctaggccgtt

SEQ ID NO: 1253 - RNA, 20 nt, synthetic construct
  misc_feature 1..20: note = Synthetic oligonucleotide
  source 1..20: mol_type = other RNA
gaccaggccagctaggccgt

SEQ ID NO: 1254 - RNA, 20 nt, synthetic construct
  misc_feature 1..20: note = Synthetic oligonucleotide
  source 1..20: mol_type = other RNA
cagaccaggccagctaggcc

SEQ ID NO: 1255 - RNA, 20 nt, synthetic construct
  misc_feature 1..20: note = Synthetic oligonucleotide
  source 1..20: mol_type = other RNA
ccagaccaggccagctaggc

SEQ ID NO: 1256 - RNA, 20 nt, synthetic construct
  misc_feature 1..20: note = Synthetic oligonucleotide
  source 1..20: mol_type = other RNA
tccagaccaggccagctagg

SEQ ID NO: 1257 - RNA, 20 nt, synthetic construct
  misc_feature 1..20: note = Synthetic oligonucleotide
  source 1..20: mol_type = other RNA
ctccagaccaggccagctag

SEQ ID NO: 1258 - RNA, 20 nt, synthetic construct
  misc_feature 1..20: note = Synthetic oligonucleotide
  source 1..20: mol_type = other RNA
cctccagaccaggccagcta

SEQ ID NO: 1259 - RNA, 20 nt, synthetic construct
  misc_feature 1..20: note = Synthetic oligonucleotide
  source 1..20: mol_type = other RNA
gcctccagaccaggccagct

SEQ ID NO: 1260 - RNA, 20 nt, synthetic construct
  misc_feature 1..20: note = Synthetic oligonucleotide
  source 1..20: mol_type = other RNA
agcctccagaccaggccagc

SEQ ID NO: 1261 - RNA, 20 nt, synthetic construct
  misc_feature 1..20: note = Synthetic oligonucleotide
  source 1..20: mol_type = other RNA
gagcctccagaccaggccag

SEQ ID NO: 1262 - RNA, 20 nt, synthetic construct
  misc_feature 1..20: note = Synthetic oligonucleotide
  source 1..20: mol_type = other RNA
atcttgggtgtggatgtaaa

SEQ ID NO: 1263 - RNA, 20 nt, synthetic construct
  misc_feature 1..20: note = Synthetic oligonucleotide
  source 1..20: mol_type = other RNA
atgcgagtcaaatctcaaga

SEQ ID NO: 1264 - RNA, 20 nt, synthetic construct
  misc_feature 1..20: note = Synthetic oligonucleotide
  source 1..20: mol_type = other RNA
catgcgagtcaaatctcaag

SEQ ID NO: 1265 - RNA, 20 nt, synthetic construct
  misc_feature 1..20: note = Synthetic oligonucleotide
  source 1..20: mol_type = other RNA
atcatgcgagtcaaatctca

SEQ ID NO: 1266 - RNA, 20 nt, synthetic construct
  misc_feature 1..20: note = Synthetic oligonucleotide
  source 1..20: mol_type = other RNA
aatcatgcgagtcaaatctc

SEQ ID NO: 1267 - RNA, 20 nt, synthetic construct
  misc_feature 1..20: note = Synthetic oligonucleotide
  source 1..20: mol_type = other RNA
caatcatgcgagtcaaatct

SEQ ID NO: 1268 - RNA, 20 nt, synthetic construct
  misc_feature 1..20: note = Synthetic oligonucleotide
  source 1..20: mol_type = other RNA
gcaatcatgcgagtcaaatc

SEQ ID NO: 1269 - RNA, 20 nt, synthetic construct
  misc_feature 1..20: note = Synthetic oligonucleotide
  source 1..20: mol_type = other RNA
tagcaatcatgcgagtcaaa

SEQ ID NO: 1270 - RNA, 20 nt, synthetic construct
  misc_feature 1..20: note = Synthetic oligonucleotide
  source 1..20: mol_type = other RNA
atagcaatcatgcgagtcaa

SEQ ID NO: 1271 - RNA, 20 nt, synthetic construct
  misc_feature 1..20: note = Synthetic oligonucleotide
  source 1..20: mol_type = other RNA
catagcaatcatgcgagtca

SEQ ID NO: 1272 - RNA, 20 nt, synthetic construct
  misc_feature 1..20: note = Synthetic oligonucleotide
  source 1..20: mol_type = other RNA
ccatagcaatcatgcgagtc

SEQ ID NO: 1273 - RNA, 20 nt, synthetic construct
  misc_feature 1..20: note = Synthetic oligonucleotide
  source 1..20: mol_type = other RNA
cccatagcaatcatgcgagt

SEQ ID NO: 1274 - RNA, 20 nt, synthetic construct
  misc_feature 1..20: note = Synthetic oligonucleotide
  source 1..20: mol_type = other RNA
tcccatagcaatcatgcgag

SEQ ID NO: 1275 - RNA, 20 nt, synthetic construct
  misc_feature 1..20: note = Synthetic oligonucleotide
  source 1..20: mol_type = other RNA
gtcccatagcaatcatgcga

SEQ ID NO: 1276 - RNA, 20 nt, synthetic construct
  misc_feature 1..20: note = Synthetic oligonucleotide
  source 1..20: mol_type = other RNA
tgtcccatagcaatcatgcg

SEQ ID NO: 1277 - RNA, 20 nt, synthetic construct
  misc_feature 1..20: note = Synthetic oligonucleotide
  source 1..20: mol_type = other RNA
ttgtcccatagcaatcatgc

SEQ ID NO: 1278 - RNA, 20 nt, synthetic construct
  misc_feature 1..20: note = Synthetic oligonucleotide
  source 1..20: mol_type = other RNA
cttgtcccatagcaatcatg

SEQ ID NO: 1279 - RNA, 20 nt, synthetic construct
  misc_feature 1..20: note = Synthetic oligonucleotide
  source 1..20: mol_type = other RNA
aaacttgtcccatagcaatc

SEQ ID NO: 1280 - RNA, 20 nt, synthetic construct
  misc_feature 1..20: note = Synthetic oligonucleotide
  source 1..20: mol_type = other RNA
tgaaaacttgtcccatagca

SEQ ID NO: 1281 - RNA, 20 nt, synthetic construct
  misc_feature 1..20: note = Synthetic oligonucleotide
  source 1..20: mol_type = other RNA
atgaaaacttgtcccatagc

SEQ ID NO: 1282 - RNA, 20 nt, synthetic construct
  misc_feature 1..20: note = Synthetic oligonucleotide
  source 1..20: mol_type = other RNA
gatgaaaacttgtcccatag

SEQ ID NO: 1283 - RNA, 20 nt, synthetic construct
  misc_feature 1..20: note = Synthetic oligonucleotide
  source 1..20: mol_type = other RNA
agatgaaaacttgtcccata

SEQ ID NO: 1284 - RNA, 20 nt, synthetic construct
  misc_feature 1..20: note = Synthetic oligonucleotide
  source 1..20: mol_type = other RNA
cagatgaaaacttgtcccat

SEQ ID NO: 1285 - RNA, 20 nt, synthetic construct
  misc_feature 1..20: note = Synthetic oligonucleotide
  source 1..20: mol_type = other RNA
gcagatgaaaacttgtccca

SEQ ID NO: 1286 - RNA, 20 nt, synthetic construct
  misc_feature 1..20: note = Synthetic oligonucleotide
  source 1..20: mol_type = other RNA
tgcagatgaaaacttgtccc

SEQ ID NO: 1287 - RNA, 20 nt, synthetic construct
  misc_feature 1..20: note = Synthetic oligonucleotide
  source 1..20: mol_type = other RNA
ctgcagatgaaaacttgtcc

SEQ ID NO: 1288 - RNA, 20 nt, synthetic construct
  misc_feature 1..20: note = Synthetic oligonucleotide
  source 1..20: mol_type = other RNA
gaaacagatttaaactgcag

SEQ ID NO: 1289 - RNA, 20 nt, synthetic construct
  misc_feature 1..20: note = Synthetic oligonucleotide
  source 1..20: mol_type = other RNA
tctagaattccaaaccccta

SEQ ID NO: 1290 - RNA, 20 nt, synthetic construct
  misc_feature 1..20: note = Synthetic oligonucleotide
  source 1..20: mol_type = other RNA
atctagaattccaaacccct

SEQ ID NO: 1291 - RNA, 20 nt, synthetic construct
  misc_feature 1..20: note = Synthetic oligonucleotide
  source 1..20: mol_type = other RNA
gatctagaattccaaacccc

SEQ ID NO: 1292 - RNA, 20 nt, synthetic construct
  misc_feature 1..20: note = Synthetic oligonucleotide
  source 1..20: mol_type = other RNA
cgatctagaattccaaaccc

SEQ ID NO: 1293 - RNA, 20 nt, synthetic construct
  misc_feature 1..20: note = Synthetic oligonucleotide
  source 1..20: mol_type = other RNA
ccaacacttcaaatacgatc

SEQ ID NO: 1294 - RNA, 20 nt, synthetic construct
  misc_feature 1..20: note = Synthetic oligonucleotide
  source 1..20: mol_type = other RNA
accaacacttcaaatacgat

SEQ ID NO: 1295 - RNA, 20 nt, synthetic construct
  misc_feature 1..20: note = Synthetic oligonucleotide
  source 1..20: mol_type = other RNA
caccaacacttcaaatacga

SEQ ID NO: 1296 - RNA, 20 nt, synthetic construct
  misc_feature 1..20: note = Synthetic oligonucleotide
  source 1..20: mol_type = other RNA
gcaccaacacttcaaatacg

SEQ ID NO: 1297 - RNA, 20 nt, synthetic construct
  misc_feature 1..20: note = Synthetic oligonucleotide
  source 1..20: mol_type = other RNA
ggcaccaacacttcaaatac

SEQ ID NO: 1298 - RNA, 20 nt, synthetic construct
  misc_feature 1..20: note = Synthetic oligonucleotide
  source 1..20: mol_type = other RNA
tggcaccaacacttcaaata

SEQ ID NO: 1299 - RNA, 20 nt, synthetic construct
  misc_feature 1..20: note = Synthetic oligonucleotide
  source 1..20: mol_type = other RNA
gtggcaccaacacttcaaat

SEQ ID NO: 1300 - RNA, 20 nt, synthetic construct
  misc_feature 1..20: note = Synthetic oligonucleotide
  source 1..20: mol_type = other RNA
cgtgcaggtgttaaggtgtg

SEQ ID NO: 1301 - RNA, 20 nt, synthetic construct
  misc_feature 1..20: note = Synthetic oligonucleotide
  source 1..20: mol_type = other RNA
gcgtgcaggtgttaaggtgt

SEQ ID NO: 1302 - RNA, 20 nt, synthetic construct
  misc_feature 1..20: note = Synthetic oligonucleotide
  source 1..20: mol_type = other RNA
agcgtgcaggtgttaaggtg

SEQ ID NO: 1303 - RNA, 20 nt, synthetic construct
  misc_feature 1..20: note = Synthetic oligonucleotide
  source 1..20: mol_type = other RNA
cagcgtgcaggtgttaaggt

SEQ ID NO: 1304 - RNA, 20 nt, synthetic construct
  misc_feature 1..20: note = Synthetic oligonucleotide
  source 1..20: mol_type = other RNA
ccagcgtgcaggtgttaagg

SEQ ID NO: 1305 - RNA, 20 nt, synthetic construct
  misc_feature 1..20: note = Synthetic oligonucleotide
  source 1..20: mol_type = other RNA
gccagcgtgcaggtgttaag

SEQ ID NO: 1306 - RNA, 20 nt, synthetic construct
  misc_feature 1..20: note = Synthetic oligonucleotide
  source 1..20: mol_type = other RNA
tgccagcgtgcaggtgttaa

SEQ ID NO: 1307 - RNA, 20 nt, synthetic construct
  misc_feature 1..20: note = Synthetic oligonucleotide
  source 1..20: mol_type = other RNA
ttgccagcgtgcaggtgtta

SEQ ID NO: 1308 - RNA, 20 nt, synthetic construct
  misc_feature 1..20: note = Synthetic oligonucleotide
  source 1..20: mol_type = other RNA
gttgccagcgtgcaggtgtt

SEQ ID NO: 1309 - RNA, 20 nt, synthetic construct
  misc_feature 1..20: note = Synthetic oligonucleotide
  source 1..20: mol_type = other RNA
tgttgccagcgtgcaggtgt

SEQ ID NO: 1310 - RNA, 20 nt, synthetic construct
  misc_feature 1..20: note = Synthetic oligonucleotide
  source 1..20: mol_type = other RNA
ttgttgccagcgtgcaggtg

SEQ ID NO: 1311 - RNA, 20 nt, synthetic construct
  misc_feature 1..20: note = Synthetic oligonucleotide
  source 1..20: mol_type = other RNA
tttgttgccagcgtgcaggt

SEQ ID NO: 1312 - RNA, 20 nt, synthetic construct
  misc_feature 1..20: note = Synthetic oligonucleotide
  source 1..20: mol_type = other RNA
ttttgttgccagcgtgcagg

SEQ ID NO: 1313 - RNA, 20 nt, synthetic construct
  misc_feature 1..20: note = Synthetic oligonucleotide
  source 1..20: mol_type = other RNA
gttttgttgccagcgtgcag

SEQ ID NO: 1314 - RNA, 20 nt, synthetic construct
  misc_feature 1..20: note = Synthetic oligonucleotide
  source 1..20: mol_type = other RNA
ggttttgttgccagcgtgca

SEQ ID NO: 1315 - RNA, 20 nt, synthetic construct
  misc_feature 1..20: note = Synthetic oligonucleotide
  source 1..20: mol_type = other RNA
cggttttgttgccagcgtgc

SEQ ID NO: 1316 - RNA, 20 nt, synthetic construct
  misc_feature 1..20: note = Synthetic oligonucleotide
  source 1..20: mol_type = other RNA
acggttttgttgccagcgtg

SEQ ID NO: 1317 - RNA, 20 nt, synthetic construct
  misc_feature 1..20: note = Synthetic oligonucleotide
  source 1..20: mol_type = other RNA
gacggttttgttgccagcgt

SEQ ID NO: 1318 - RNA, 20 nt, synthetic construct
  misc_feature 1..20: note = Synthetic oligonucleotide
  source 1..20: mol_type = other RNA
ggacggttttgttgccagcg

SEQ ID NO: 1319 - RNA, 20 nt, synthetic construct
  misc_feature 1..20: note = Synthetic oligonucleotide
  source 1..20: mol_type = other RNA
cggacggttttgttgccagc

SEQ ID NO: 1320 - RNA, 20 nt, synthetic construct
  misc_feature 1..20: note = Synthetic oligonucleotide
  source 1..20: mol_type = other RNA
gcggacggttttgttgccag

SEQ ID NO: 1321 - RNA, 20 nt, synthetic construct
  misc_feature 1..20: note = Synthetic oligonucleotide
  source 1..20: mol_type = other RNA
agcggacggttttgttgcca

SEQ ID NO: 1322 - RNA, 20 nt, synthetic construct
  misc_feature 1..20: note = Synthetic oligonucleotide
  source 1..20: mol_type = other RNA
gagcggacggttttgttgcc

SEQ ID NO: 1323 - RNA, 20 nt, synthetic construct
  misc_feature 1..20: note = Synthetic oligonucleotide
  source 1..20: mol_type = other RNA
agagcggacggttttgttgc

SEQ ID NO: 1324 - RNA, 20 nt, synthetic construct
  misc_feature 1..20: note = Synthetic oligonucleotide
  source 1..20: mol_type = other RNA
cagagcggacggttttgttg

SEQ ID NO: 1325 - RNA, 20 nt, synthetic construct
  misc_feature 1..20: note = Synthetic oligonucleotide
  source 1..20: mol_type = other RNA
gcagagcggacggttttgtt

SEQ ID NO: 1326 - RNA, 20 nt, synthetic construct
  misc_feature 1..20: note = Synthetic oligonucleotide
  source 1..20: mol_type = other RNA
tgcagagcggacggttttgt

SEQ ID NO: 1327 - RNA, 20 nt, synthetic construct
  misc_feature 1..20: note = Synthetic oligonucleotide
  source 1..20: mol_type = other RNA
ctgcagagcggacggttttg

SEQ ID NO: 1328 - RNA, 20 nt, synthetic construct
  misc_feature 1..20: note = Synthetic oligonucleotide
  source 1..20: mol_type = other RNA
gctgcagagcggacggtttt

SEQ ID NO: 1329 - RNA, 20 nt, synthetic construct
  misc_feature 1..20: note = Synthetic oligonucleotide
  source 1..20: mol_type = other RNA
tgctgcagagcggacggttt

SEQ ID NO: 1330 - RNA, 20 nt, synthetic construct
  misc_feature 1..20: note = Synthetic oligonucleotide
  source 1..20: mol_type = other RNA
gtgctgcagagcggacggtt

SEQ ID NO: 1331 - RNA, 20 nt, synthetic construct
  misc_feature 1..20: note = Synthetic oligonucleotide
  source 1..20: mol_type = other RNA
tgtgctgcagagcggacggt

SEQ ID NO: 1332 - RNA, 20 nt, synthetic construct
  misc_feature 1..20: note = Synthetic oligonucleotide
  source 1..20: mol_type = other RNA
ctgtgctgcagagcggacgg

SEQ ID NO: 1333 - RNA, 20 nt, synthetic construct
  misc_feature 1..20: note = Synthetic oligonucleotide
  source 1..20: mol_type = other RNA
gctgtgctgcagagcggacg

SEQ ID NO: 1334 - RNA, 20 nt, synthetic construct
  misc_feature 1..20: note = Synthetic oligonucleotide
  source 1..20: mol_type = other RNA
agctgtgctgcagagcggac

SEQ ID NO: 1335 - RNA, 20 nt, synthetic construct
  misc_feature 1..20: note = Synthetic oligonucleotide
  source 1..20: mol_type = other RNA
cagctgtgctgcagagcgga

SEQ ID NO: 1336 - RNA, 20 nt, synthetic construct
  misc_feature 1..20: note = Synthetic oligonucleotide
  source 1..20: mol_type = other RNA
cccagctgtgctgcagagcg

SEQ ID NO: 1337 - RNA, 20 nt, synthetic construct
  misc_feature 1..20: note = Synthetic oligonucleotide
  source 1..20: mol_type = other RNA
ccccagctgtgctgcagagc

SEQ ID NO: 1338 - RNA, 20 nt, synthetic construct
  misc_feature 1..20: note = Synthetic oligonucleotide
  source 1..20: mol_type = other RNA
accccagctgtgctgcagag

SEQ ID NO: 1339 - RNA, 20 nt, synthetic construct
  misc_feature 1..20: note = Synthetic oligonucleotide
  source 1..20: mol_type = other RNA
gaccccagctgtgctgcaga

SEQ ID NO: 1340 - RNA, 20 nt, synthetic construct
  misc_feature 1..20: note = Synthetic oligonucleotide
  source 1..20: mol_type = other RNA
tgaccccagctgtgctgcag

SEQ ID NO: 1341 - RNA, 20 nt, synthetic construct
  misc_feature 1..20: note = Synthetic oligonucleotide
  source 1..20: mol_type = other RNA
gtgaccccagctgtgctgca

SEQ ID NO: 1342 - RNA, 20 nt, synthetic construct
  misc_feature 1..20: note = Synthetic oligonucleotide
  source 1..20: mol_type = other RNA
ggtgaccccagctgtgctgc

SEQ ID NO: 1343 - RNA, 20 nt, synthetic construct
  misc_feature 1..20: note = Synthetic oligonucleotide
  source 1..20: mol_type = other RNA
aggtgaccccagctgtgctg

SEQ ID NO: 1344 - RNA, 20 nt, synthetic construct
  misc_feature 1..20: note = Synthetic oligonucleotide
  source 1..20: mol_type = other RNA
caggtgaccccagctgtgct

SEQ ID NO: 1345 - RNA, 20 nt, synthetic construct
  misc_feature 1..20: note = Synthetic oligonucleotide
  source 1..20: mol_type = other RNA
tcaggtgaccccagctgtgc

SEQ ID NO: 1346 - RNA, 20 nt, synthetic construct
  misc_feature 1..20: note = Synthetic oligonucleotide
  source 1..20: mol_type = other RNA
gtcaggtgaccccagctgtg

SEQ ID NO: 1347 - RNA, 20 nt, synthetic construct
  misc_feature 1..20: note = Synthetic oligonucleotide
  source 1..20: mol_type = other RNA
ggtcaggtgaccccagctgt

SEQ ID NO: 1348 - RNA, 20 nt, synthetic construct
  misc_feature 1..20: note = Synthetic oligonucleotide
  source 1..20: mol_type = other RNA
aggtcaggtgaccccagctg

SEQ ID NO: 1349 - RNA, 20 nt, synthetic construct
  misc_feature 1..20: note = Synthetic oligonucleotide
  source 1..20: mol_type = other RNA
aaggtcaggtgaccccagct

SEQ ID NO: 1350 - RNA, 20 nt, synthetic construct
  misc_feature 1..20: note = Synthetic oligonucleotide
  source 1..20: mol_type = other RNA
aaaggtcaggtgaccccagc

SEQ ID NO: 1351 - RNA, 20 nt, synthetic construct
  misc_feature 1..20: note = Synthetic oligonucleotide
  source 1..20: mol_type = other RNA
gaaaggtcaggtgaccccag

SEQ ID NO: 1352 - RNA, 20 nt, synthetic construct
  misc_feature 1..20: note = Synthetic oligonucleotide
  source 1..20: mol_type = other RNA
agaaaggtcaggtgacccca

SEQ ID NO: 1353 - RNA, 20 nt, synthetic construct
  misc_feature 1..20: note = Synthetic oligonucleotide
  source 1..20: mol_type = other RNA
gagaaaggtcaggtgacccc

SEQ ID NO: 1354 - RNA, 20 nt, synthetic construct
  misc_feature 1..20: note = Synthetic oligonucleotide
  source 1..20: mol_type = other RNA
ggagaaaggtcaggtgaccc

SEQ ID NO: 1355 - RNA, 20 nt, synthetic construct
  misc_feature 1..20: note = Synthetic oligonucleotide
  source 1..20: mol_type = other RNA
aggagaaaggtcaggtgacc

SEQ ID NO: 1356 - RNA, 20 nt, synthetic construct
  misc_feature 1..20: note = Synthetic oligonucleotide
  source 1..20: mol_type = other RNA
caggagaaaggtcaggtgac

SEQ ID NO: 1357 - RNA, 20 nt, synthetic construct
  misc_feature 1..20: note = Synthetic oligonucleotide
  source 1..20: mol_type = other RNA
acaggagaaaggtcaggtga

SEQ ID NO: 1358 - RNA, 20 nt, synthetic construct
  misc_feature 1..20: note = Synthetic oligonucleotide
  source 1..20: mol_type = other RNA
gacaggagaaaggtcaggtg

SEQ ID NO: 1359 - RNA, 20 nt, synthetic construct
  misc_feature 1..20: note = Synthetic oligonucleotide
  source 1..20: mol_type = other RNA
gccactgagctcaagtgggg

SEQ ID NO: 1360 - RNA, 20 nt, synthetic construct
  misc_feature 1..20: note = Synthetic oligonucleotide
  source 1..20: mol_type = other RNA
agccactgagctcaagtggg

SEQ ID NO: 1361 - RNA, 20 nt, synthetic construct
  misc_feature 1..20: note = Synthetic oligonucleotide
  source 1..20: mol_type = other RNA
cagccactgagctcaagtgg

SEQ ID NO: 1362 - RNA, 20 nt, synthetic construct
  misc_feature 1..20: note = Synthetic oligonucleotide
  source 1..20: mol_type = other RNA
ccagccactgagctcaagtg

SEQ ID NO: 1363 - RNA, 20 nt, synthetic construct
  misc_feature 1..20: note = Synthetic oligonucleotide
  source 1..20: mol_type = other RNA
cccagccactgagctcaagt

SEQ ID NO: 1364 - RNA, 20 nt, synthetic construct
  misc_feature 1..20: note = Synthetic oligonucleotide
  source 1..20: mol_type = other RNA
gcccagccactgagctcaag

SEQ ID NO: 1365 - RNA, 20 nt, synthetic construct
  misc_feature 1..20: note = Synthetic oligonucleotide
  source 1..20: mol_type = other RNA
tgcccagccactgagctcaa

SEQ ID NO: 1366 - RNA, 20 nt, synthetic construct
  misc_feature 1..20: note = Synthetic oligonucleotide
  source 1..20: mol_type = other RNA
ctgcccagccactgagctca

SEQ ID NO: 1367 - RNA, 20 nt, synthetic construct
  misc_feature 1..20: note = Synthetic oligonucleotide
  source 1..20: mol_type = other RNA
gctgcccagccactgagctc

SEQ ID NO: 1368 - RNA, 20 nt, synthetic construct
  misc_feature 1..20: note = Synthetic oligonucleotide
  source 1..20: mol_type = other RNA
tgctgcccagccactgagct

SEQ ID NO: 1369 - RNA, 20 nt, synthetic construct
  misc_feature 1..20: note = Synthetic oligonucleotide
  source 1..20: mol_type = other RNA
ccctgctgcccagccactga

SEQ ID NO: 1370 - RNA, 20 nt, synthetic construct
  misc_feature 1..20: note = Synthetic oligonucleotide
  source 1..20: mol_type = other RNA
cccctgctgcccagccactg

SEQ ID NO: 1371 - RNA, 20 nt, synthetic construct
  misc_feature 1..20: note = Synthetic oligonucleotide
  source 1..20: mol_type = other RNA
tcccctgctgcccagccact

SEQ ID NO: 1372 - RNA, 20 nt, synthetic construct
  misc_feature 1..20: note = Synthetic oligonucleotide
  source 1..20: mol_type = other RNA
catcccctgctgcccagcca

SEQ ID NO: 1373 - RNA, 20 nt, synthetic construct
  misc_feature 1..20: note = Synthetic oligonucleotide
  source 1..20: mol_type = other RNA
gcatcccctgctgcccagcc

SEQ ID NO: 1374 - RNA, 20 nt, synthetic construct
  misc_feature 1..20: note = Synthetic oligonucleotide
  source 1..20: mol_type = other RNA
tgcatcccctgctgcccagc

SEQ ID NO: 1375 - RNA, 20 nt, synthetic construct
  misc_feature 1..20: note = Synthetic oligonucleotide
  source 1..20: mol_type = other RNA
atgcatcccctgctgcccag

SEQ ID NO: 1376 - RNA, 20 nt, synthetic construct
  misc_feature 1..20: note = Synthetic oligonucleotide
  source 1..20: mol_type = other RNA
catgcatcccctgctgccca

SEQ ID NO: 1377 - RNA, 20 nt, synthetic construct
  misc_feature 1..20: note = Synthetic oligonucleotide
  source 1..20: mol_type = other RNA
gccatgcatcccctgctgcc

SEQ ID NO: 1378 - RNA, 20 nt, synthetic construct
  misc_feature 1..20: note = Synthetic oligonucleotide
  source 1..20: mol_type = other RNA
ggccatgcatcccctgctgc

SEQ ID NO: 1379 - RNA, 20 nt, synthetic construct
  misc_feature 1..20: note = Synthetic oligonucleotide
  source 1..20: mol_type = other RNA
tggccatgcatcccctgctg

SEQ ID NO: 1380 - RNA, 20 nt, synthetic construct
  misc_feature 1..20: note = Synthetic oligonucleotide
  source 1..20: mol_type = other RNA
gtggccatgcatcccctgct

SEQ ID NO: 1381 - RNA, 20 nt, synthetic construct
  misc_feature 1..20: note = Synthetic oligonucleotide
  source 1..20: mol_type = other RNA
agtggccatgcatcccctgc

SEQ ID NO: 1382 - RNA, 20 nt, synthetic construct
  misc_feature 1..20: note = Synthetic oligonucleotide
  source 1..20: mol_type = other RNA
cagtggccatgcatcccctg

SEQ ID NO: 1383 - RNA, 20 nt, synthetic construct
  misc_feature 1..20: note = Synthetic oligonucleotide
  source 1..20: mol_type = other RNA
ccagtggccatgcatcccct

SEQ ID NO: 1384 - RNA, 20 nt, synthetic construct
  misc_feature 1..20: note = Synthetic oligonucleotide
  source 1..20: mol_type = other RNA
gccggccagtggccatgcat

SEQ ID NO: 1385 - RNA, 20 nt, synthetic construct
  misc_feature 1..20: note = Synthetic oligonucleotide
  source 1..20: mol_type = other RNA
ctgagagctgcacctggccg

SEQ ID NO: 1386 - RNA, 20 nt, synthetic construct
  misc_feature 1..20: note = Synthetic oligonucleotide
  source 1..20: mol_type = other RNA
gctgagagctgcacctggcc

SEQ ID NO: 1387 - RNA, 20 nt, synthetic construct
  misc_feature 1..20: note = Synthetic oligonucleotide
  source 1..20: mol_type = other RNA
agctgagagctgcacctggc

SEQ ID NO: 1388 - RNA, 20 nt, synthetic construct
  misc_feature 1..20: note = Synthetic oligonucleotide
  source 1..20: mol_type = other RNA
cagctgagagctgcacctgg

SEQ ID NO: 1389 - RNA, 20 nt, synthetic construct
  misc_feature 1..20: note = Synthetic oligonucleotide
  source 1..20: mol_type = other RNA
ccagctgagagctgcacctg

SEQ ID NO: 1390 - RNA, 20 nt, synthetic construct
  misc_feature 1..20: note = Synthetic oligonucleotide
  source 1..20: mol_type = other RNA
cccagctgagagctgcacct

SEQ ID NO: 1391 - RNA, 20 nt, synthetic construct
  misc_feature 1..20: note = Synthetic oligonucleotide
  source 1..20: mol_type = other RNA
ccccagctgagagctgcacc

SEQ ID NO: 1392 - RNA, 20 nt, synthetic construct
  misc_feature 1..20: note = Synthetic oligonucleotide
  source 1..20: mol_type = other RNA
accccagctgagagctgcac

SEQ ID NO: 1393 - RNA, 20 nt, synthetic construct
  misc_feature 1..20: note = Synthetic oligonucleotide
  source 1..20: mol_type = other RNA
caccccagctgagagctgca

SEQ ID NO: 1394 - RNA, 20 nt, synthetic construct
  misc_feature 1..20: note = Synthetic oligonucleotide
  source 1..20: mol_type = other RNA
acaccccagctgagagctgc

SEQ ID NO: 1395 - RNA, 20 nt, synthetic construct
  misc_feature 1..20: note = Synthetic oligonucleotide
  source 1..20: mol_type = other RNA
aacaccccagctgagagctg

SEQ ID NO: 1396 - RNA, 20 nt, synthetic construct
  misc_feature 1..20: note = Synthetic oligonucleotide
  source 1..20: mol_type = other RNA
gaacaccccagctgagagct

SEQ ID NO: 1397 - RNA, 20 nt, synthetic construct
  misc_feature 1..20: note = Synthetic oligonucleotide
  source 1..20: mol_type = other RNA
tgaacaccccagctgagagc

SEQ ID NO: 1398 - RNA, 20 nt, synthetic construct
  misc_feature 1..20: note = Synthetic oligonucleotide
  source 1..20: mol_type = other RNA
ctgaacaccccagctgagag

SEQ ID NO: 1399 - RNA, 20 nt, synthetic construct
  misc_feature 1..20: note = Synthetic oligonucleotide
  source 1..20: mol_type = other RNA
tctgaacaccccagctgaga

SEQ ID NO: 1400 - RNA, 20 nt, synthetic construct
  misc_feature 1..20: note = Synthetic oligonucleotide
  source 1..20: mol_type = other RNA
ctctgaacaccccagctgag

SEQ ID NO: 1401 - RNA, 20 nt, synthetic construct
  misc_feature 1..20: note = Synthetic oligonucleotide
  source 1..20: mol_type = other RNA
cctctgaacaccccagctga

SEQ ID NO: 1402 - RNA, 20 nt, synthetic construct
  misc_feature 1..20: note = Synthetic oligonucleotide
  source 1..20: mol_type = other RNA
tcctctgaacaccccagctg

SEQ ID NO: 1403 - RNA, 20 nt, synthetic construct
  misc_feature 1..20: note = Synthetic oligonucleotide
  source 1..20: mol_type = other RNA
gtcctctgaacaccccagct

SEQ ID NO: 1404 - RNA, 20 nt, synthetic construct
  misc_feature 1..20: note = Synthetic oligonucleotide
  source 1..20: mol_type = other RNA
cgtcctctgaacaccccagc

SEQ ID NO: 1405 - RNA, 20 nt, synthetic construct
  misc_feature 1..20: note = Synthetic oligonucleotide
  source 1..20: mol_type = other RNA
gcgtcctctgaacaccccag

SEQ ID NO: 1406 - RNA, 20 nt, synthetic construct
  misc_feature 1..20: note = Synthetic oligonucleotide
  source 1..20: mol_type = other RNA
ggcgtcctctgaacacccca

SEQ ID NO: 1407 - RNA, 20 nt, synthetic construct
  misc_feature 1..20: note = Synthetic oligonucleotide
  source 1..20: mol_type = other RNA
aggcgtcctctgaacacccc

SEQ ID NO: 1408 - RNA, 20 nt, synthetic construct
  misc_feature 1..20: note = Synthetic oligonucleotide
  source 1..20: mol_type = other RNA
caggcgtcctctgaacaccc

SEQ ID NO: 1409 - RNA, 20 nt, synthetic construct
  misc_feature 1..20: note = Synthetic oligonucleotide
  source 1..20: mol_type = other RNA
acaggcgtcctctgaacacc

SEQ ID NO: 1410 - RNA, 20 nt, synthetic construct
  misc_feature 1..20: note = Synthetic oligonucleotide
  source 1..20: mol_type = other RNA
cacaggcgtcctctgaacac

SEQ ID NO: 1411 - RNA, 20 nt, synthetic construct
  misc_feature 1..20: note = Synthetic oligonucleotide
  source 1..20: mol_type = other RNA
acacaggcgtcctctgaaca

SEQ ID NO: 1412 - RNA, 20 nt, synthetic construct
  misc_feature 1..20: note = Synthetic oligonucleotide
  source 1..20: mol_type = other RNA
gacacaggcgtcctctgaac

SEQ ID NO: 1413 - RNA, 20 nt, synthetic construct
  misc_feature 1..20: note = Synthetic oligonucleotide
  source 1..20: mol_type = other RNA
ggacacaggcgtcctctgaa

SEQ ID NO: 1414 - RNA, 20 nt, synthetic construct
  misc_feature 1..20: note = Synthetic oligonucleotide
  source 1..20: mol_type = other RNA
aggacacaggcgtcctctga

SEQ ID NO: 1415 - RNA, 20 nt, synthetic construct
  misc_feature 1..20: note = Synthetic oligonucleotide
  source 1..20: mol_type = other RNA
gaggacacaggcgtcctctg

SEQ ID NO: 1416 - RNA, 20 nt, synthetic construct
  misc_feature 1..20: note = Synthetic oligonucleotide
  source 1..20: mol_type = other RNA
ggaggacacaggcgtcctct

SEQ ID NO: 1417 - RNA, 20 nt, synthetic construct
  misc_feature 1..20: note = Synthetic oligonucleotide
  source 1..20: mol_type = other RNA
gggaggacacaggcgtcctc

SEQ ID NO: 1418 - RNA, 20 nt, synthetic construct
  misc_feature 1..20: note = Synthetic oligonucleotide
  source 1..20: mol_type = other RNA
ggggaggacacaggcgtcct

SEQ ID NO: 1419 - RNA, 20 nt, synthetic construct
  misc_feature 1..20: note = Synthetic oligonucleotide
  source 1..20: mol_type = other RNA
tgcctccaagggtgacagag

SEQ ID NO: 1420 - RNA, 20 nt, synthetic construct
  misc_feature 1..20: note = Synthetic oligonucleotide
  source 1..20: mol_type = other RNA
ctgcctccaagggtgacaga

SEQ ID NO: 1421 - RNA, 20 nt, synthetic construct
  misc_feature 1..20: note = Synthetic oligonucleotide
  source 1..20: mol_type = other RNA
tctgcctccaagggtgacag

SEQ ID NO: 1422 - RNA, 20 nt, synthetic construct
  misc_feature 1..20: note = Synthetic oligonucleotide
  source 1..20: mol_type = other RNA
ctctgcctccaagggtgaca

SEQ ID NO: 1423 - RNA, 20 nt, synthetic construct
  misc_feature 1..20: note = Synthetic oligonucleotide
  source 1..20: mol_type = other RNA
tctctgcctccaagggtgac

SEQ ID NO: 1424 - RNA, 20 nt, synthetic construct
  misc_feature 1..20: note = Synthetic oligonucleotide
  source 1..20: mol_type = other RNA
ttctctgcctccaagggtga

SEQ ID NO: 1425 - RNA, 20 nt, synthetic construct
  misc_feature 1..20: note = Synthetic oligonucleotide
  source 1..20: mol_type = other RNA
gttctctgcctccaagggtg

SEQ ID NO: 1426 - RNA, 20 nt, synthetic construct
  misc_feature 1..20: note = Synthetic oligonucleotide
  source 1..20: mol_type = other RNA
agttctctgcctccaagggt

SEQ ID NO: 1427 - RNA, 20 nt, synthetic construct
  misc_feature 1..20: note = Synthetic oligonucleotide
  source 1..20: mol_type = other RNA
aagttctctgcctccaaggg

SEQ ID NO: 1428 - RNA, 20 nt, synthetic construct
  misc_feature 1..20: note = Synthetic oligonucleotide
  source 1..20: mol_type = other RNA
aaagttctctgcctccaagg

SEQ ID NO: 1429 - RNA, 20 nt, synthetic construct
  misc_feature 1..20: note = Synthetic oligonucleotide
  source 1..20: mol_type = other RNA
caaagttctctgcctccaag

SEQ ID NO: 1430 - RNA, 20 nt, synthetic construct
  misc_feature 1..20: note = Synthetic oligonucleotide
  source 1..20: mol_type = other RNA
gcaaagttctctgcctccaa

SEQ ID NO: 1431 - DNA, 20 bp, synthetic construct
  misc_feature 1..20: note = Synthetic primer
  source 1..20: mol_type = other DNA
ggaactgtgagacgcacaag

SEQ ID NO: 1432 - DNA, 22 bp, synthetic construct
  misc_feature 1..22: note = Synthetic primer
  source 1..22: mol_type = other DNA
catggatattcaactgtgggtg

SEQ ID NO: 1433 - DNA, 22 bp, synthetic construct
  misc_feature 1..22: note = Synthetic primer
  source 1..22: mol_type = other DNA
ctcaacaacatggagattggca

SEQ ID NO: 1434 - DNA, 21 bp, synthetic construct
  misc_feature 1..21: note = Synthetic primer
  source 1..21: mol_type = other DNA
gacaaagtcaacaggcaaggt

SEQ ID NO: 1435 - DNA, 20 bp, synthetic construct
  misc_feature 1..20: note = Synthetic primer
  source 1..20: mol_type = other DNA
agaacatcggaactgcgact

SEQ ID NO: 1436 - DNA, 18 bp, synthetic construct
  misc_feature 1..18: note = Synthetic primer
  source 1..18: mol_type = other DNA
cagaccattccccggtcg

SEQ ID NO: 1437 - DNA, 600 bp, Homo sapiens
  source 1..600: mol_type = other DNA
aagactctgtctcaaacaaacaaaacaaaacaaacaaaaagacgtaagatgtggaccgctggagaatgggggtgctgcctgcagtcaaaacggagtgggggtgcccagctcagggccagaatgatcctattcccggcacttctcagtgaggctctgtggctcacctaagaaaccagcctcccttgcaggcaacggcctagctggcctggtctggaggctctcttcaaatatttacatccacacccaagatacagtcttgagatttgactcgcatgattgctatgggacaagttttcatctgcagtttaaatctgtttcccaacttacattaggggtttggaattctagatcgtatttgaagtgttggtgccacacacaccttaacacctgcacgctggcaacaaaaccgtccgctctgcagcacagctggggtcacctgacctttctcctgtcccccccacttgagctcagtggctgggcagcaggggatgcatggccactggccggccaggtgcagctctcagctggggtgttcagaggacgcctgtgtcctcccctcccccatccctctgtcacccttggaggcagagaactttgccc

SEQ ID NO: 1438 - DNA, 179 bp, Homo sapiens
  source 1..179: mol_type = other DNA
gtaagatgtggaccgctggagaatgggggtgctgcctgcagtcaaaacggagtgggggtgcccagctcagggccagaatgatcctattcccggcacttctcagtgaggctctgtggctcacctaagaaaccagcctcccttgcaggcaacggcctagctggcctggtctggaggctctc

SEQ ID NO: 1439 - DNA, 49 bp, Homo sapiens
  source 1..49: mol_type = other DNA
tcttgagatttgactcgcatgattgctatgggacaagttttcatctgca

SEQ ID NO: 1440 - DNA, 181 bp, Homo sapiens
  source 1..181: mol_type = other DNA
taggggtttggaattctagatcgtatttgaagtgttggtgccacacacaccttaacacctgcacgctggcaacaaaaccgtccgctctgcagcacagctggggtcacctgacctttctcctgtcccccccacttgagctcagtggctgggcagcaggggatgcatggccactggccggcca

SEQ ID NO: 1441 - DNA, 96 bp, Homo sapiens
  source 1..96: mol_type = other DNA
cggccaggtgcagctctcagctggggtgttcagaggacgcctgtgtcctcccctcccccatccctctgtcacccttggaggcagagaactttgccc

SEQ ID NO: 1442 - RNA, 20 nt, synthetic construct
  misc_feature 1..20: note = Synthetic oligonucleotide
  modified_base order(1,2,3): mod_base = OTHER; note = phosphorothioate (PS) backbone modification
  modified_base order(1,3,5,7,13,15,17,19): mod_base = OTHER; note = 2'-O-methyl
  modified_base order(2,4,6,8,9,10,11,12,14,16,18,20): mod_base = OTHER; note = 2'-fluoro
  source 1..20: mol_type = other RNA
ggtgctgcctgcagtcaaaa

SEQ ID NO: 1443 - RNA, 22 nt, synthetic construct
  misc_feature 1..22: note = Synthetic oligonucleotide
  modified_base order(1,2,3,20,21,22): mod_base = OTHER; note = phosphorothioate (PS) backbone modification
  modified_base 1: mod_base = OTHER; note = 5'-(E)-vinylphosphonate
  modified_base order(2,4,6,8,10,12,14,16,18,20,22): mod_base = OTHER; note = 2'-fluoro
  modified_base order(1,3,5,7,9,11,13,15,17,19,21): mod_base = OTHER; note = 2'-O-methyl
  source 1..22: mol_type = other RNA
ttttgactgcaggcagcacccc

SEQ ID NO: 1444 - RNA, 20 nt, synthetic construct
  misc_feature 1..20: note = Synthetic oligonucleotide
  modified_base order(1,2,3): mod_base = OTHER; note = phosphorothioate (PS) backbone modification
  modified_base order(1,3,5,7,13,15,17,19): mod_base = OTHER; note = 2'-O-methyl
  modified_base order(2,4,6,8,9,10,11,12,14,16,18,20): mod_base = OTHER; note = 2'-fluoro
  source 1..20: mol_type = other RNA
ctcagggccagaatgatcct

SEQ ID NO: 1445 - RNA, 22 nt, synthetic construct
  misc_feature 1..22: note = Synthetic oligonucleotide
  modified_base order(1,2,3,20,21,22): mod_base = OTHER; note = phosphorothioate (PS) backbone modification
  modified_base 1: mod_base = OTHER; note = 5'-(E)-vinylphosphonate
  modified_base order(2,4,6,8,10,12,14,16,18,20,22): mod_base = OTHER; note = 2'-fluoro
  modified_base order(1,3,5,7,9,11,13,15,17,19,21): mod_base = OTHER; note = 2'-O-methyl
  source 1..22: mol_type = other RNA
aggatcattctggccctgagct

SEQ ID NO: 1446 - RNA, 20 nt, synthetic construct
  misc_feature 1..20: note = Synthetic oligonucleotide
  modified_base order(1,2,3): mod_base = OTHER; note = phosphorothioate (PS) backbone modification
  modified_base order(1,3,5,7,13,15,17,19): mod_base = OTHER; note = 2'-O-methyl
  modified_base order(2,4,6,8,9,10,11,12,14,16,18,20): mod_base = OTHER; note = 2'-fluoro
  source 1..20: mol_type = other RNA
agaaaccagcctcccttgca

SEQ ID NO: 1447 - RNA, 22 nt, synthetic construct
  misc_feature 1..22: note = Synthetic oligonucleotide
  modified_base order(1,2,3,20,21,22): mod_base = OTHER; note = phosphorothioate (PS) backbone modification
  modified_base 1: mod_base = OTHER; note = 5'-(E)-vinylphosphonate
  modified_base order(2,4,6,8,10,12,14,16,18,20,22): mod_base = OTHER; note = 2'-fluoro
  modified_base order(1,3,5,7,9,11,13,15,17,19,21): mod_base = OTHER; note = 2'-O-methyl
  source 1..22: mol_type = other RNA
tgcaagggaggctggtttctta

SEQ ID NO: 1448 - RNA, 20 nt, synthetic construct
  misc_feature 1..20: note = Synthetic oligonucleotide
  modified_base order(1,2,3): mod_base = OTHER; note = phosphorothioate (PS) backbone modification
  modified_base order(1,2,3,4,5,7,11,12,13,14,15,16,17,18,19,20): mod_base = OTHER; note = 2'-O-methyl
  modified_base order(6,8,9,10): mod_base = OTHER; note = 2'-fluoro
  source 1..20: mol_type = other RNA
ggtgctgcctgcagtcaaaa

SEQ ID NO: 1449 - RNA, 22 nt, synthetic construct
  misc_feature 1..22: note = Synthetic oligonucleotide
  modified_base order(1,2,3,20,21,22): mod_base = OTHER; note = phosphorothioate (PS) backbone modification
  modified_base 1: mod_base = OTHER; note = 5'-(E)-vinylphosphonate
  modified_base order(2,6,12,14): mod_base = OTHER; note = 2'-fluoro
  modified_base order(1,3,4,5,7,8,9,10,11,13,15,16,17,18,19,20,21,22): mod_base = OTHER; note = 2'-O-methyl
  source 1..22: mol_type = other RNA
ttttgactgcaggcagcacccc

SEQ ID NO: 1450 - RNA, 20 nt, synthetic construct
  misc_feature 1..20: note = Synthetic oligonucleotide
  modified_base order(1,2,3): mod_base = OTHER; note = phosphorothioate (PS) backbone modification
  modified_base order(1,2,3,4,5,7,11,12,13,14,15,16,17,18,19,20): mod_base = OTHER; note = 2'-O-methyl
  modified_base order(6,8,9,10): mod_base = OTHER; note = 2'-fluoro
  source 1..20: mol_type = other RNA
gctctgtggctcacctaaga

SEQ ID NO: 1451 - RNA, 22 nt, synthetic construct
  misc_feature 1..22: note = Synthetic oligonucleotide
  modified_base order(1,2,3,20,21,22): mod_base = OTHER; note = phosphorothioate (PS) backbone modification
  modified_base 1: mod_base = OTHER; note = 5'-(E)-vinylphosphonate
  modified_base order(2,6,12,14): mod_base = OTHER; note = 2'-fluoro
  modified_base order(1,3,4,5,7,8,9,10,11,13,15,16,17,18,19,20,21,22): mod_base = OTHER; note = 2'-O-methyl
  source 1..22: mol_type = other RNA
tcttaggtgagccacagagcct

SEQ ID NO: 1452 - RNA, 20 nt, synthetic construct
  misc_feature 1..20: note = Synthetic oligonucleotide
  modified_base order(1,2,3): mod_base = OTHER; note = phosphorothioate (PS) backbone modification
  modified_base order(1,2,3,4,5,7,11,12,13,14,15,16,17,18,19,20): mod_base = OTHER; note = 2'-O-methyl
  modified_base order(6,8,9,10): mod_base = OTHER; note = 2'-fluoro
  source 1..20: mol_type = other RNA
cctaagaaaccagcctccct

SEQ ID NO: 1453 - RNA, 22 nt, synthetic construct
  misc_feature 1..22: note = Synthetic oligonucleotide
  modified_base order(1,2,3,20,21,22): mod_base = OTHER; note = phosphorothioate (PS) backbone modification
  modified_base 1: mod_base = OTHER; note = 5'-(E)-vinylphosphonate
  modified_base order(2,6,12,14): mod_base = OTHER; note = 2'-fluoro
  modified_base order(1,3,4,5,7,8,9,10,11,13,15,16,17,18,19,20,21,22): mod_base = OTHER; note = 2'-O-methyl
  source 1..22: mol_type = other RNA
agggaggctggtttcttaggtg

SEQ ID NO: 1454 - RNA, 20 nt, synthetic construct
  misc_feature 1..20: note = Synthetic oligonucleotide
  modified_base order(1,2,3): mod_base = OTHER; note = phosphorothioate (PS) backbone modification
  modified_base order(1,2,3,4,5,7,11,12,13,14,15,16,17,18,19,20): mod_base = OTHER; note = 2'-O-methyl
  modified_base order(6,8,9,10): mod_base = OTHER; note = 2'-fluoro
  source 1..20: mol_type = other RNA
agaaaccagcctcccttgca

SEQ ID NO: 1455 - RNA, 22 nt, synthetic construct
  misc_feature 1..22: note = Synthetic oligonucleotide
  modified_base order(1,2,3,20,21,22): mod_base = OTHER; note = phosphorothioate (PS) backbone modification
  modified_base 1: mod_base = OTHER; note = 5'-(E)-vinylphosphonate
  modified_base order(2,6,12,14): mod_base = OTHER; note = 2'-fluoro
  modified_base order(1,3,4,5,7,8,9,10,11,13,15,16,17,18,19,20,21,22): mod_base = OTHER; note = 2'-O-methyl
  source 1..22: mol_type = other RNA
tgcaagggaggctggtttctta

SEQ ID NO: 1456 - RNA, 20 nt, synthetic construct
  misc_feature 1..20: note = Synthetic oligonucleotide
  modified_base order(1,2,3): mod_base = OTHER; note = phosphorothioate (PS) backbone modification
  modified_base order(1,2,3,4,5,7,11,12,13,14,15,16,17,18,19,20): mod_base = OTHER; note = 2'-O-methyl
  modified_base order(6,8,9,10): mod_base = OTHER; note = 2'-fluoro
  source 1..20: mol_type = other RNA
aggacgcctgtgtcctcccc

SEQ ID NO: 1457 - RNA, 22 nt, synthetic construct
  misc_feature 1..22: note = Synthetic oligonucleotide
  modified_base order(1,2,3,20,21,22): mod_base = OTHER; note = phosphorothioate (PS) backbone modification
  modified_base 1: mod_base = OTHER; note = 5'-(E)-vinylphosphonate
  modified_base order(2,6,12,14): mod_base = OTHER; note = 2'-fluoro
  modified_base order(1,3,4,5,7,8,9,10,11,13,15,16,17,18,19,20,21,22): mod_base = OTHER; note = 2'-O-methyl
  source 1..22: mol_type = other RNA
ggggaggacacaggcgtcctct

SEQ ID NO: 1458 - RNA, 20 nt, synthetic construct
  misc_feature 1..20: note = Synthetic oligonucleotide
  modified_base order(1,2,3): mod_base = OTHER; note = phosphorothioate (PS) backbone modification
  modified_base order(1,2,3,4,5,7,11,12,13,15,16,17,18,19,20): mod_base = OTHER; note = 2'-O-methyl
  modified_base order(6,8,9,10,14): mod_base = OTHER; note = 2'-fluoro
  source 1..20: mol_type = other RNA
ggtgctgcctgcagtcaaaa

SEQ ID NO: 1459 - RNA, 22 nt, synthetic construct
  misc_feature 1..22: note = Synthetic oligonucleotide
  modified_base order(1,2,3,20,21,22): mod_base = OTHER; note = phosphorothioate (PS) backbone modification
  modified_base 1: mod_base = OTHER; note = 5'-(E)-vinylphosphonate
  modified_base order(2,4,6,8,12,14,16): mod_base = OTHER; note = 2'-fluoro
  modified_base order(1,3,5,7,9,10,11,13,15,17,18,19,20,21,22): mod_base = OTHER; note = 2'-O-methyl
  source 1..22: mol_type = other RNA
ttttgactgcaggcagcacccc

SEQ ID NO: 1460 - RNA, 20 nt, synthetic construct
  misc_feature 1..20: note = Synthetic oligonucleotide
  modified_base order(1,2,3): mod_base = OTHER; note = phosphorothioate (PS) backbone modification
  modified_base order(1,2,3,4,5,7,11,12,13,15,16,17,18,19,20): mod_base = OTHER; note = 2'-O-methyl
  modified_base order(6,8,9,10,14): mod_base = OTHER; note = 2'-fluoro
  source 1..20: mol_type = other RNA
ctcagggccagaatgatcct

SEQ ID NO: 1461 - RNA, 22 nt, synthetic construct
  misc_feature 1..22: note = Synthetic oligonucleotide
  modified_base order(1,2,3,20,21,22): mod_base = OTHER; note = phosphorothioate (PS) backbone modification
  modified_base 1: mod_base = OTHER; note = 5'-(E)-vinylphosphonate
  modified_base order(2,4,6,8,12,14,16): mod_base = OTHER; note = 2'-fluoro
  modified_base order(1,3,5,7,9,10,11,13,15,17,18,19,20,21,22): mod_base = OTHER; note = 2'-O-methyl
  source 1..22: mol_type = other RNA
aggatcattctggccctgagct

SEQ ID NO: 1462 - RNA, 20 nt, synthetic construct
  misc_feature 1..20: note = Synthetic oligonucleotide
  modified_base order(1,2,3): mod_base = OTHER; note = phosphorothioate (PS) backbone modification
  modified_base order(1,2,3,4,5,7,11,12,13,15,16,17,18,19,20): mod_base = OTHER; note = 2'-O-methyl
  modified_base order(6,8,9,10,14): mod_base = OTHER; note = 2'-fluoro
  source 1..20: mol_type = other RNA
cacttctcagtgaggctctg

SEQ ID NO: 1463 - RNA, 22 nt, synthetic construct
  misc_feature 1..22: note = Synthetic oligonucleotide
  modified_base order(1,2,3,20,21,22): mod_base = OTHER; note = phosphorothioate (PS) backbone modification
  modified_base 1: mod_base = OTHER; note = 5'-(E)-vinylphosphonate
  modified_base order(2,4,6,8,12,14,16): mod_base = OTHER; note = 2'-fluoro
  modified_base order(1,3,5,7,9,10,11,13,15,17,18,19,20,21,22): mod_base = OTHER; note = 2'-O-methyl
  source 1..22: mol_type = other RNA
cagagcctcactgagaagtgcc

SEQ ID NO: 1464 - RNA, 20 nt, synthetic construct
  misc_feature 1..20: note = Synthetic oligonucleotide
  modified_base order(1,2,3): mod_base = OTHER; note = phosphorothioate (PS) backbone modification
  modified_base order(1,2,3,4,5,7,11,12,13,15,16,17,18,19,20): mod_base = OTHER; note = 2'-O-methyl
  modified_base order(6,8,9,10,14): mod_base = OTHER; note = 2'-fluoro
  source 1..20: mol_type = other RNA
agaaaccagcctcccttgca

SEQ ID NO: 1465 - RNA, 22 nt, synthetic construct
  misc_feature 1..22: note = Synthetic oligonucleotide
  modified_base order(1,2,3,20,21,22): mod_base = OTHER; note = phosphorothioate (PS) backbone modification
  modified_base 1: mod_base = OTHER; note = 5'-(E)-vinylphosphonate
  modified_base order(2,4,6,8,12,14,16): mod_base = OTHER; note = 2'-fluoro
  modified_base order(1,3,5,7,9,10,11,13,15,17,18,19,20,21,22): mod_base = OTHER; note = 2'-O-methyl
  source 1..22: mol_type = other RNA
tgcaagggaggctggtttctta

SEQ ID NO: 1466 - RNA, 20 nt, synthetic construct
  misc_feature 1..20: note = Synthetic oligonucleotide
  modified_base order(1,2,3): mod_base = OTHER; note = phosphorothioate (PS) backbone modification
  modified_base order(1,2,3,4,5,7,11,12,13,15,16,17,18,19,20): mod_base = OTHER; note = 2'-O-methyl
  modified_base order(6,8,9,10,14): mod_base = OTHER; note = 2'-fluoro
  source 1..20: mol_type = other RNA
gccaggtgcagctctcagct

SEQ ID NO: 1467 - RNA, 22 nt, synthetic construct
  misc_feature 1..22: note = Synthetic oligonucleotide
  modified_base order(1,2,3,20,21,22): mod_base = OTHER; note = phosphorothioate (PS) backbone modification
  modified_base 1: mod_base = OTHER; note = 5'-(E)-vinylphosphonate
  modified_base order(2,4,6,8,12,14,16): mod_base = OTHER; note = 2'-fluoro
  modified_base order(1,3,5,7,9,10,11,13,15,17,18,19,20,21,22): mod_base = OTHER; note = 2'-O-methyl
  source 1..22: mol_type = other RNA
agctgagagctgcacctggccg

SEQ ID NO: 1468 - RNA, 21 nt, synthetic construct
  misc_feature 1..21: note = Synthetic oligonucleotide
  modified_base order(1,3,5,7,12,13,16,17,18,19,21): mod_base = OTHER; note = 2'-O-methyl
  modified_base order(2,4,6,8,9,10,11,14,15,20): mod_base = OTHER; note = 2'-fluoro
  source 1..21: mol_type = other RNA
cgtatttgaagtgttggtgcc

SEQ ID NO: 1469 - RNA, 21 nt, synthetic construct
  misc_feature 1..21: note = Synthetic oligonucleotide
  modified_base order(1,3,5,7,12,13,16,17,18,19,21): mod_base = OTHER; note = 2'-O-methyl
  modified_base order(2,4,6,8,9,10,11,14,15,20): mod_base = OTHER; note = 2'-fluoro
  source 1..21: mol_type = other RNA
ggcaccaacacttcaaatacg

SEQ ID NO: 1470 - RNA, 21 nt, synthetic construct
  misc_feature 1..21: note = Synthetic oligonucleotide
  modified_base order(1,3,5,6,7,8,12,13,14,16,17,18,19,21): mod_base = OTHER; note = 2'-O-methyl
  modified_base order(2,4,9,11,15,20): mod_base = OTHER; note = 2'-fluoro
  modified_base 10: mod_base = OTHER; note = Cytosine deoxyribonucleic acid
  source 1..21: mol_type = other RNA
ctggggtcacctgacctttct

SEQ ID NO: 1471 - RNA, 21 nt, synthetic construct
  misc_feature 1..21: note = Synthetic oligonucleotide
  modified_base order(1,3,5,6,7,8,12,13,14,16,17,18,19,21): mod_base = OTHER; note = 2'-O-methyl
  modified_base order(2,4,9,11,15,20): mod_base = OTHER; note = 2'-fluoro
  modified_base 10: mod_base = OTHER; note = Adenosine deoxyribonucleic acid
  source 1..21: mol_type = other RNA
agaaaggtcaggtgaccccag

SEQ ID NO: 1472 - RNA, 22 nt, synthetic construct
  misc_feature 1..22: note = Synthetic oligonucleotide
  modified_base order(1,2,3,20,21,22): mod_base = OTHER; note = phosphorothioate (PS) backbone modification
  modified_base 1: mod_base = OTHER; note = 5'-(E)-vinylphosphonate
  modified_base order(2,4,6,8,10,12,14,16,18,20,22): mod_base = OTHER; note = 2'-fluoro
  modified_base order(1,3,5,7,9,11,13,15,17,19,21): mod_base = OTHER; note = 2'-O-methyl
  source 1..22: mol_type = other RNA
ctggggtgttcagaggacgcct

SEQ ID NO: 1473 - RNA, 20 nt, synthetic construct
  misc_feature 1..20: note = Synthetic oligonucleotide
  modified_base order(1,2,3): mod_base = OTHER; note = phosphorothioate (PS) backbone modification
  modified_base order(1,3,5,7,13,15,17,19): mod_base = OTHER; note = 2'-O-methyl
  modified_base order(2,4,6,8,9,10,11,12,14,16,18,20): mod_base = OTHER; note = 2'-fluoro
  source 1..20: mol_type = other RNA
gcgtcctctgaacaccccag

SEQ ID NO: 1474 - RNA, 22 nt, synthetic construct
  misc_feature 1..22: note = Synthetic oligonucleotide
  modified_base order(1,2,3,20,21,22): mod_base = OTHER; note = phosphorothioate (PS) backbone modification
  modified_base 1: mod_base = OTHER; note = 5'-(E)-vinylphosphonate
  modified_base order(2,6,12,14): mod_base = OTHER; note = 2'-fluoro
  modified_base order(1,3,4,5,7,8,9,10,11,13,15,16,17,18,19,20,21,22): mod_base = OTHER; note = 2'-O-methyl
  source 1..22: mol_type = other RNA
ctggggtcacctgacctttctc

SEQ ID NO: 1475 - RNA, 20 nt, synthetic construct
  misc_feature 1..20: note = Synthetic oligonucleotide
  modified_base order(1,2,3): mod_base = OTHER; note = phosphorothioate (PS) backbone modification
  modified_base order(1,2,3,4,5,7,11,12,13,15,17,19,20): mod_base = OTHER; note = 2'-O-methyl
  modified_base order(6,8,9,10,14,16,18): mod_base = OTHER; note = 2'-fluoro
  source 1..20: mol_type = other RNA
gaaaggtcaggtgaccccag

SEQ ID NO: 1476 - RNA, 20 nt, synthetic construct
  misc_feature 1..20: note = Synthetic oligonucleotide
  modified_base order(1,2,3): mod_base = OTHER; note = phosphorothioate (PS) backbone modification
  modified_base order(1,2,3,4,5,7,11,12,13,15,16,17,18,19,20): mod_base = OTHER; note = 2'-O-methyl
  modified_base order(6,8,9,10,14): mod_base = OTHER; note = 2'-fluoro
  modified_base 20: mod_base = OTHER; note = tC2x6 compound
  source 1..20: mol_type = other RNA
ctcagggccagaatgatcct

SEQ ID NO: 1477 - RNA, 20 nt, synthetic construct
  misc_feature 1..20: note = Synthetic oligonucleotide
  modified_base order(1,2,3): mod_base = OTHER; note = phosphorothioate (PS) backbone modification
  modified_base order(1,2,3,4,5,7,11,12,13,14,15,16,17,18,19,20): mod_base = OTHER; note = 2'-O-methyl
  modified_base order(6,8,9,10): mod_base = OTHER; note = 2'-fluoro
  modified_base 20: mod_base = OTHER; note = tC2x6 compound
  source 1..20: mol_type = other RNA
tcctggcaccaaatcccata

SEQ ID NO: 1478 - RNA, 22 nt, synthetic construct
  misc_feature 1..22: note = Synthetic oligonucleotide
  modified_base order(1,2,3,20,21,22): mod_base = OTHER; note = phosphorothioate (PS) backbone modification
  modified_base 1: mod_base = OTHER; note = 5'-(E)-vinylphosphonate
  modified_base order(2,6,12,14): mod_base = OTHER; note = 2'-fluoro
  modified_base order(1,3,4,5,7,8,9,10,11,13,15,16,17,18,19,20,21,22): mod_base = OTHER; note = 2'-O-methyl
  source 1..22: mol_type = other RNA
tatgggatttggtgccaggaca

SEQ ID NO: 1479 - RNA, 20 nt, synthetic construct
  misc_feature 1..20: note = Synthetic oligonucleotide
  modified_base order(1,2,3,18,19,20): mod_base = OTHER; note = phosphorothioate (PS) backbone modification
  modified_base order(1,2,3,4,5,7,11,12,13,14,15,16,17,18,19,20): mod_base = OTHER; note = 2'-O-methyl
  modified_base order(6,8,9,10): mod_base = OTHER; note = 2'-fluoro
  source 1..20: mol_type = other RNA
tcctggcaccaaatcccata

SEQ ID NO: 1480 - RNA, 21 nt, synthetic construct
  modified_base 20..21: mod_base = OTHER; note = thymine
  misc_feature order(1,2,3,4,5,6,7,8,9,10,11,12,13,14,15,16,17,18,19): note = mis_feature - RNA
  misc_feature order(20,21): note = mis_feature - DNA
  misc_feature 1..21: note = Synthetic oligonucleotide
  source 1..21: mol_type = other RNA
cctggcaccaaatcccatatt

SEQ ID NO: 1481 - RNA, 21 nt, synthetic construct
  modified_base 20..21: mod_base = OTHER; note = thymine
  misc_feature order(1,2,3,4,5,6,7,8,9,10,11,12,13,14,15,16,17,18,19): note = mis_feature - RNA
  misc_feature order(20,21): note = mis_feature - DNA
  misc_feature 1..21: note = Synthetic oligonucleotide
  source 1..21: mol_type = other RNA
tatgggatttggtgccaggtt

SEQ ID NO: 1482 - RNA, 21 nt, synthetic construct
  modified_base 20..21: mod_base = OTHER; note = thymine
  misc_feature order(1,2,3,4,5,6,7,8,9,10,11,12,13,14,15,16,17,18,19): note = mis_feature - RNA
  misc_feature order(20,21): note = mis_feature - DNA
  misc_feature 1..21: note = Synthetic oligonucleotide
  source 1..21: mol_type = other RNA
actactgagtgacagtagatt

SEQ ID NO: 1483 - RNA, 21 nt, synthetic construct
  modified_base 20..21: mod_base = OTHER; note = thymine
  misc_feature order(1,2,3,4,5,6,7,8,9,10,11,12,13,14,15,16,17,18,19): note = mis_feature - RNA
  misc_feature order(20,21): note = mis_feature - DNA
  misc_feature 1..21: note = Synthetic oligonucleotide
  source 1..21: mol_type = other RNA
tctactgtcactcagtagttt

SEQ ID NO: 1484 - RNA, 20 nt, synthetic construct
  misc_feature 1..20: note = Synthetic oligonucleotide
  modified_base order(1,2,3,18,19,20): mod_base = OTHER; note = phosphorothioate (PS) backbone modification
  modified_base order(1,3,5,7,9,13,15,17,19): mod_base = OTHER; note = 2'-O-methyl
  modified_base order(2,4,6,8,10,11,12,14,16,18,20): mod_base = OTHER; note = 2'-fluoro
  source 1..20: mol_type = other RNA
gactactgagtgacagtaga

SEQ ID NO: 1485 - RNA, 22 nt, synthetic construct
  misc_feature 1..22: note = Synthetic oligonucleotide
  modified_base order(1,2,3,20,21,22): mod_base = OTHER; note = phosphorothioate (PS) backbone modification
  modified_base 1: mod_base = OTHER; note = 5'-(E)-vinylphosphonate
  modified_base order(2,4,6,8,10,12,14,16,18,20,22): mod_base = OTHER; note = 2'-fluoro
  modified_base order(1,3,5,7,9,11,13,15,17,19,21): mod_base = OTHER; note = 2'-O-methyl
  source 1..22: mol_type = other RNA
tctactgtcactcagtagtcgt

SEQ ID NO: 1486 - RNA, 20 nt, synthetic construct
  misc_feature 1..20: note = Synthetic oligonucleotide
  modified_base order(1,2,3,18,19,20): mod_base = OTHER; note = phosphorothioate (PS) backbone modification
  modified_base order(1,2,3,4,5,7,11,12,13,14,15,16,17,18,19,20): mod_base = OTHER; note = 2'-O-methyl
  modified_base order(6,8,9,10): mod_base = OTHER; note = 2'-fluoro
  source 1..20: mol_type = other RNA
gactactgagtgacagtaga

SEQ ID NO: 1487 - RNA, 22 nt, synthetic construct
  misc_feature 1..22: note = Synthetic oligonucleotide
  modified_base order(1,2,3,20,21,22): mod_base = OTHER; note = phosphorothioate (PS) backbone modification
  modified_base 1: mod_base = OTHER; note = 5'-(E)-vinylphosphonate
  modified_base order(2,6,12,14): mod_base = OTHER; note = 2'-fluoro
  modified_base order(1,3,4,5,7,8,9,10,11,13,15,16,17,18,19,20,21,22): mod_base = OTHER; note = 2'-O-methyl
  source 1..22: mol_type = other RNA
tctactgtcactcagtagtcgt